(19) United States
(12) Patent Application Publication
(10) Pub. No.: US 2013/0052160 A1
(43) Pub. Date: Feb. 28, 2013

(54) COMPOUNDS AND USES THEREOF TO INDUCE AN IMMUNOGENIC CANCER CELL DEATH IN A SUBJECT

(71) Applicants: Laurence Zitvogel, Paris (FR); Guido Kroemer, Paris (FR); Nicolas Delahaye, La Hulpe (BE); Yuting Ma, Vitry Sur Seine (FR); Oliver Kepp, Paris (FR)

(72) Inventors: Laurence Zitvogel, Paris (FR); Guido Kroemer, Paris (FR); Nicolas Delahaye, La Hulpe (BE); Yuting Ma, Vitry Sur Seine (FR); Oliver Kepp, Paris (FR)

(73) Assignee: INSTITUT GUSTAVE ROUSSY, VILLEJUIF CEDEX (FR)

(21) Appl. No.: 13/642,221

(22) PCT Filed: Apr. 1, 2011
(86) PCT No.: PCT/EP2011/055134

§ 371 Date: Oct. 19, 2012

(30) Foreign Application Priority Data
Apr. 22, 2010 (EP) PCT/EP2010/055404
Jul. 13, 2010 (IB) PCT/IB2010/002034

(51) Int. Cl. C12Q 1/68; A61K 38/20; G01N 21/64; A61K 31/365; G01N 33/566; A61K 31/7048; C40B 30/00; A61K 38/17; C07K 14/545; C07D 307/93; C07K 14/47; A61K 31/7076; C07H 19/20; C07J 17/00; A61P 35/00; G01N 33/574

(52) U.S. Cl. 424/85.2; 435/6.12; 435/7.23; 435/6.11; 514/468; 435/7.92; 514/26; 506/7; 514/1.1; 530/351; 549/299; 530/350; 514/47; 536/26.26; 536/6.1

(57) ABSTRACT

The present invention relates to the fields of genetics, immunology and medicine. The present invention more specifically relates to in vitro or ex vivo methods for determining the susceptibility to a cancer treatment of a subject having a tumour. These methods comprise a step of determining the ability of the treatment, of the subject and/or of the tumour to induce an anticancer immune response, the inability of at least one of the treatment, the subject and the tumor to induce an anticancer immune response being indicative of a resistance of the subject to the therapeutic treatment of cancer. Inventors in particular identify genes specific of a human subject or of cancerous cells which can be used to predict or assess the sensitivity of a subject to a treatment of cancer. The invention also relates to particular compounds capable of activating or enhancing the immune system of a particular subject, when the subject is exposed to a therapeutic treatment of cancer or before such an exposition. It further relates to uses of such compounds, in particular to prepare a pharmaceutical composition to allow or improve the efficiency of a therapy of cancer in a subject in need thereof. The present invention in addition provides kits, methods for selecting a compound of interest, as well as pharmaceutical compositions and uses thereof.

[0001] The present disclosure generally relates to the fields of genetics, immunology and medicine. The present invention more specifically relates to in vitro or ex vivo methods for determining the susceptibility to a cancer treatment of a subject having a tumour. These methods comprise a step of determining the ability of the treatment, of the subject and/or of the tumour to induce an anticancer immune response, the inability of at least one of the treatment, the subject and the tumor to induce an anticancer immune response being indicative of a resistance of the subject to the therapeutic treatment of cancer.

[0002] Inventors in particular identify genes specific of a human subject or of cancerous cells which can be used to predict or assess the sensitivity of a subject to a treatment of cancer.

[0003] The invention also relates to particular compounds capable of activating or enhancing the immune system of a particular subject, when the subject is exposed to a therapeutic treatment of cancer or before such an exposition. It further relates to uses of such compounds, in particular to prepare a pharmaceutical composition to allow or improve the efficiency of a therapy of cancer in a subject in need thereof.

[0004] The present invention in addition provides kits, methods for selecting a compound of interest, as well as pharmaceutical compositions and uses thereof.

### BACKGROUND ART

[0005] Cancer is the major cause of mortality in most industrialized countries.

[0006] Although several anti-cancer therapies are proposed, amongst which feature chemotherapy [anthracyclines such as daunorubicine, doxorubicin (DX), idarubicin and mitoxantrone (MTX), as well as oxali-platinum (oxaliplatin or OXP), cis-platinum (cisplatin or CDDP), and taxanes (paclitaxel or docetaxel) are considered as the most efficient cytotoxic agents of the oncologist armamentarium] and radiotherapy [XR], the benefits of said treatments still tends to be insufficient.

[0007] Cytotoxic agents are supposed to directly destroy cancer cells by stimulating diverse cell death pathways. Nonetheless, several lines of evidence point to a critical contribution of the host immune system to the therapeutic activity mediated by tumoricidal agents (Zitvogel et al., 2008). Indeed, in some instances, the cell death modality triggered by chemotherapy or radiotherapy allows recognition of dying tumor cells by antigen presenting cells, thus eliciting a tumor-specific cognate immune response which is critical for tumor elimination.

[0008] However, most of standard chemotherapies induce a non-immunogenic apoptosis (Zitvogel et al., 2004; Steinman et al., 2004; Lake et al., 2006). Thus, even after an initially efficient chemotherapy, patients who do not develop an efficient antitumourous immune response are confronted to chemotherapy-resistant tumourous variants.

[0009] Inventors have shown for the first time that OXP and anthracyclines induce immunogenic cell death while other chemotherapeutic agents such as CDDP and alkylating agents tend to induce non-immunogenic cell death (Casares et al., 2005; Obeid et al., 2007). They have further observed that some patients were also resistant to treatments identified as inducing an immunogenic cell death. Solutions to detect dysfunctions responsible for an absent or reduced response to existing treatments as well as compounds usable to overcome said dysfunctions therefore appear critical for the patient and are herein advantageously provided by inventors.

### SUMMARY

[0010] The present invention is based on the observation by inventors that the cell death immunogenicity depends on the lethal stimulus, on the presence of specific signals produced by or exposed on tumor cells, as well as on the ability of the subject having the tumor, and in particular of the subject's immune system, to recognize said signals.

[0011] The present invention provides an in vitro or ex vivo method of assessing the sensitivity of a subject having a tumor to a treatment of cancer (in other words of determining susceptibility of a patient having a tumor to respond to a treatment of cancer), which method comprises a step of detecting the presence of an anticancer immune response of the subject undergoing the treatment of cancer, the absence of an anticancer immune response being indicative of a resistance of the subject to the treatment of cancer.

[0012] The method may be applied before and/or after exposition of the subject to the treatment of cancer. In a particular embodiment, the therapeutic treatment of cancer is a conventional immunogenic treatment of cancer selected from a chemotherapy using a drug selected from an anthracyclin, a platin, a taxane and an antimitotic agent, preferably from an anthracyclin, a platin, and an antimitotic agent; and radiotherapy.

[0013] The presence of cells selected from IL-17 producing γδ T lymphocytes, dendritic cells and cytotoxic T lymphocytes, in the tumor of the subject may in particular be indicative of an anticancer immune response and of a sensitivity of the subject to the treatment of cancer.

[0014] As well, the appearance of anti-CRT antibodies in a sample, typically a serum sample, of a subject after a first exposition of the subject to a treatment of cancer, and preferably an increase of said anti-CRT antibodies during said treatment, may be indicative of an anticancer immune response and of a sensitivity of the subject to said treatment of cancer.

[0015] In vitro or ex vivo methods of assessing the sensitivity of a subject having a tumor to a treatment of cancer are further herein described. These methods comprise a step of determining the ability of the treatment, of the tumor and/or of the subject to induce an anticancer immune response, the inability of at least one of the treatment, the subject and the tumor to induce an anticancer immune response being indicative of a resistance of the subject to the treatment of cancer.

[0016] The presence, in the subject, of an alteration leading to the abnormal expression of an immune gene, as herein described, may in particular determine the inability of the subject to induce an anticancer immune response. The alteration may be a single nucleotide polymorphism (SNP).

[0017] The step of determining the ability of the tumor to induce an anticancer immune response may in particular consist in verifying the expression by tumor cells of an immunogenic cell death marker selected from a protein allowing or enhancing CRT exposure at the surface of tumor cells, and a protein expressed during the endoplasmic reticulum (ER) stress response and/or during the macroautophagic response of the subject's immune system.

[0018] A method of selecting an optimal therapeutic treatment of cancer in a subject having a tumor is in addition herein described. This method comprises a step as previously described of assessing the sensitivity of the subject to a first treatment of cancer (herein also identified as “conventional treatment”) and, if the subject is resistant to said first treatment of cancer, a step of selecting a “compensatory molecule”, to be used, alone or in combination with the first treatment of cancer as the optimal therapeutic treatment of cancer for the subject.

[0019] A particular method of selecting an optimal therapeutic treatment of cancer in a subject having a tumor is a method comprising a step of assessing the sensitivity of the subject to a first treatment of cancer with a method as herein described, and, if the subject is resistant to said first treatment of cancer, and a step of selecting (i) a product allowing or enhancing the secretion of ATP, HMGB1, LysRS and/or IL-8, and/or the exposure of CRT, ERp57, LysRS and/or KDEL receptor at the surface of a tumour cell, (ii) a product stimulating the autophagy machinery and/or an ER stress response, (iii) a product recruiting and/or activating IL-17 producing γδ T lymphocytes, cytotoxic T cells and/or dendritic cells, (iv) a product promoting activation of the TLR4/myd88 pathway, or able to bypass said pathway, (v) a product triggering the P2RX7 (P2X purinoceptor 7) and/or the NALP3 inflammasome, (vi) a product allowing or enhancing the secretion of IL-1b, (vii) a product capable of stimulating intratumoral Vd2 T lymphocytes, and (viii) a product selected from an anti-allergic drug, a neurotropic drug, an antihypertensive or cardiotropic drug such as a cardiac glycoside, a spindle poison drug, an antimicrobial drug, an anti-osteoclastic drug, a diuretic drug, an oestrogen, an apyrase inhibitor (or ecto-ATPase inhibitor), and (ix) any combination thereof, to be used in combination with the first treatment of cancer as the optimal therapeutic treatment of cancer for the subject.

[0020] Also herein described are compensatory molecules for use in the treatment of cancer, preferably in combination with a conventional treatment of cancer, in particular a chemotherapeutic treatment of cancer, in a subject identified, by a method as previously described, as resistant to a conventional treatment of cancer.

[0021] The present invention further encompasses the use of such a compensatory molecule to prepare a pharmaceutical composition for treating a cancer in a subject identified, by a method as previously described, as resistant to a conventional treatment of cancer, as well as the corresponding pharmaceutical composition. Preferably, the pharmaceutical composition further comprises, as a combined preparation, a drug used in a conventional treatment of cancer, for simultaneous, separate or sequential use in the treatment of said cancer.

[0022] The present invention in particular encompasses a drug selected from (i) a product allowing or enhancing the secretion of ATP, HMGB1, LysRS and/or IL-8, and/or the exposure of CRT, ERp57, LysRS and/or KDEL receptor at the surface of a tumour cell, (ii) a product stimulating the autophagy machinery and/or an ER stress response, (iii) a product recruiting and/or activating IL-17 producing γδ T lymphocytes, cytotoxic T cells and/or dendritic cells, (iv) a product promoting activation of the TLR4/myd88 pathway, or able to bypass said pathway, (v) a product triggering the P2RX7 (P2X purinoceptor 7) and/or the NALP3 inflammasome, (vi) a product allowing or enhancing the secretion of IL-1b, (vii) a product capable of stimulating intratumoral Vd2 T lymphocytes, and (viii) a product selected from an anti-allergic drug, a neurotropic drug, an antihypertensive or cardiotropic drug such as a cardiac glycoside, a spindle poison drug, an antimicrobial drug, an anti-osteoclastic drug, a diuretic drug, an oestrogen, an apyrase inhibitor (or ecto-ATPase inhibitor) and (ix) any combination thereof, for use in a treatment of cancer, preferably in combination with a conventional immunogenic treatment of cancer selected from a chemotherapy using a drug selected from an anthracyclin, a platin, a taxane and an antimitotic agent, preferably from an anthracyclin, an oxaliplatin, a taxane and an antimitotic agent; and radiotherapy, in a subject identified as resistant to said conventional immunogenic treatment of cancer according to a method as herein described of assessing the sensitivity of a subject having a tumor to a therapeutic treatment of cancer.

[0023] Induction of immunogenic cancer-cell death, using a compensatory molecule as herein described, allows the subject's immune system, thanks to the present invention, to contribute, through a “bystander effect”, to the eradication of cancer cells and cancer stem cells which are resistant to conventional therapeutic treatments.

[0024] Herein described is also a method of treating cancer comprising the administration to a subject in need thereof, as previously explained, of a compensatory molecule, preferably together with a drug used in a conventional treatment of cancer (as a combined preparation).

[0025] Further herein described are the following kits:
[0026] A kit to detect the abnormal expression, in particular in a tumor biopsy, of a gene selected from CCR1, EIF2AK2, DNAJC10, PDIA3, EIF2A, PPP1CB, IKBKB, PPP1CC, BAX and combinations thereof, in a tumor sample of the subject, the kit comprising (i) at least one pair of primers and (ii) at least one fluorescent probe, for example two different probes, allowing the quantitative detection of the expression of a gene selected from CCR1, EIF2AK2, DNAJC10, PDIA3, EIF2A, PPP1CB, IKBKB, PPP1CC, BAX, and (iii) a leaflet providing the control quantitative expression values corresponding to at least one of said genes in a control population.
[0027] A kit to detect the presence of a polymorphism associated with an abnormal expression of a gene selected from AHR and MTHFR (for example a kit to detect the presence of a polymorphism associated with an abnormal expression of such a gene), in a tumor or blood sample of the subject, the kit comprising (i) at least one pair of primers, and (ii) at least two differently labelled probes, the first probe recognizing the wild-type allele and the second probe recognizing the mutated allele of a gene selected from AHR and MTHFR.
[0028] A kit to detect the presence of a polymorphism associated with an abnormal expression of a gene selected from FAT2 and MTHFR (for example a kit to detect the presence of a polymorphism associated with an abnormal expression of such a gene), in a tumor or blood sample of the subject, the kit comprising (i) at least one pair of primers, and (ii) at least two differently labelled probes, the first probe recognizing the wild-type allele and the second probe recognizing the mutated allele of a gene selected from FAT2 and MTHFR.
[0029] A kit to detect the presence of a polymorphism associated with an abnormal expression of a gene selected from DDX58 (RIG-1) and CX3CR1 (for example a kit to detect the presence of a polymorphism associated with an abnormal expression of such a gene), in a tumor or blood sample of the subject, the kit comprising (i) at least one pair of primers, and (ii) at least two differently labelled probes, the first probe recognizing the wild-type allele and the second probe recognizing the mutated allele of a gene selected from DDX58 and CX3CR1.
[0030] A kit to detect the presence of a polymorphism associated with an abnormal expression of a NLRP4 gene (for example a kit to detect the presence of a polymorphism associated with an abnormal expression of such a gene), in a tumor or blood sample of the subject, the kit comprising (i) at least one pair of primers, and (ii) at least two differently labelled probes, the first probe recognizing the wild-type allele and the second probe recognizing the mutated allele of the NLRP4 gene.
[0031] A kit comprising:
[0032] a. (i) at least one pair of primers, (ii) at least one fluorescent probe allowing the quantitative detection of the expression of a gene selected from CCR1, EIF2AK2, DNAJC10, PDIA3, EIF2A, PPP1CB, IKBKB, PPP1CC and BAX and (iii) a leaflet providing the control quantitative expression values corresponding to at least one of said genes in a control population; and
[0033] b. (i) at least one pair of primers, and (ii) at least two differently labelled probes, the first probe recognizing the wild-type allele and the second probe recognizing the mutated allele of a gene selected from NLRP4, FAT2 and MTHFR (for neoadjuvant therapy) or TLR4, P2RX7, DDX58 (for adjuvant therapy).
   [0034] A kit comprising:
[0035] a. several antibodies for immunohistochemistry usage recognizing the core protein machinery of ER stress and autophagy in tissue sections (paraffin embedded- or frozen) suh as phosphorylated eif2a, ERp57, calreticulin, HMGB1, LC3 gate 16 GABARAP (gamma-aminobutyric acid receptor-associated protein); and
[0036] b. (i) at least one pair of primers, and (ii) at least two differently labelled probes, the first probe recognizing the wild-type allele and the second probe recognizing the mutated allele of a gene selected from NLRP4, FAT2 and MTHFR (for neoadjuvant therapy) or TLR4, P2RX7, DDX58 (for adjuvant therapy).

### FIGURES

[0037] FIG. 1. Th1 and Th17 related genes expression in tumors post-chemotherapy.

[0038] (A) MCA205 tumors were treated with Doxorubicin (DX) or PBS. Tumor growth was monitored before and 8 days post-chemotherapy.

[0039] (B) Gene expression in DX versus PBS group was tested by RT-PCR (Taqman) and shown as fold change 8 days after treatment (lower panel). A more than 2 fold change was used as threshold for significant differences.

[0040] (C) Measurements of protein levels of IFN-γ and IL-17 in tumor homogeneates by ELISA at different time points.

[0041] (D) AHR antagonist CH223191 was dissolved with DMSO and diluted in Olive Oil. Mice treated with either PBS or DX received a daily i.p. injection of CH223191 (2 mM, 100 μl) for 4 days starting from the day of DX (or PBS) treatment.

[0042] (E) Expression of IFN-γ and IL-17 in dissociated tumor beds was tested by intracellular staining gated on live, CD45.2⁺ and CD3⁺ cells at day 8 post-treatment. Each group contained at least 5 mice and each experiment was performed at least twice yielding identical results.

[0043] Each graph depicts means±SEM of tumor sizes (A, D) or protein expression (C) or percentages of positive cells (E). *p<0.05, **p<0.01, ***p<0.001.

[0044] FIG. 2. CD8⁺ T cells and γδ T cells are the major sources of IFN-γ and IL-17 respectively post-chemotherapy.

[0045] (A) Single cell suspensions of MCA205 tumors (day 8 post-DX) were analyzed by flow cytometry. IFN-γ and IL-17 positive cells were gated within live CD45.2⁺ and CD3⁺ cells (TILs). Within this gate, the proportions of CD3⁺ CD8⁺ cells and CD3⁺ TCR δ⁺ cells were examined. A typical dot plot analysis is shown.

[0046] (B) A typical dot plot in one DX or PBS treated tumor showing IFN-γ production by CD8 and IL-17 production by γδ T is depicted (upper panel). The percentages of IFN-γ⁺ and IL-17⁺ T cells among CD4⁺, CD8⁺ and TCRδ⁺ TILs in PBS versus DX-treated tumors are indicated as means±SEM of 5 tumors per condition (lower panel).

[0047] (C) Absolute numbers of IFN-γ⁺ CD8⁺T cells and IL-17^{+γδ T cells per} 1 mm³ of tumor are indicated as means±SEM in 5 tumors treated with DX or PBS.

[0048] (D) Kinetic study of IL-17 and IFN-γ production by γδ T and CD8⁺ T cells respectively analyzed by flow cytometry in tumors treated with PBS or DX.

[0049] (E) Ki67 expression on γδ TILs 8 days after DX showed as means±SEM in 5 tumors treated with DX or PBS.

[0050] (F) Correlation between the percentages of γδ T17 and Tc1 TILs in all tumors (treated or not) was plotted for MCA205 sarcomas (each dot representing one tumor). *p<0.05, **p<0.01, ***p<0.001.

[0051] FIG. 3. Recruitment of both Tc1 and γδ T17 cells correlate with better outcome in radiotherapy of TS/A tumors.

[0052] (A) Established TS/A tumors were treated with local irradiation on day 7. Mice were segregated into responders and non responders according to their tumor regression (TR) or tumor progression (TP) after radiotherapy (n=5).

[0053] (B) Percentages of CD8⁺T cells and Tc1 among CD3⁺ TILs are indicated as means±SEM.

[0054] (C) Percentages of γδ T and γδ T17 cells among CD3⁺ TILs are indicated as means±SEM.

[0055] (D) Correlation between the percentages of γδ T17 and Tc1 TILs in all tumors (treated or not) was plotted for TS/A mammary cancers (each dot representing one tumor).

[0056] *p<0.05, **p<0.01, ***p<0.001.

[0057] FIG. 4. IL-17 contributes to prophylactic and therapeutic responses to immunogenic chemotherapy.

[0058] (A) Role of IFN-γ and IL-17 in DX-mediated anti-tumor effects. Mice bearing established MCA205 sarcoma were treated with local DX and systemic neutralizing antibodies (against mouse IFN-γ (left panel) or IL-17 (right panel) or isotype control (Iso ctrl) i.p. every 2 days (3 injections total) starting from the day of DX. Tumor sizes are plotted as means±SEM for 5 mice/group. The experiment was performed twice with identical results.

[0059] (B-C) Role of IL-17/IL-17Rα signaling pathway in the immunogenicity of cell death. Oxaliplatin (OX)-treated EG-7 cells were inoculated in the footpad of WT versus IL-17Rα^{-/-} mice (n=5) (B) or into WT mice along with anti-IL-17 neutralizing Ab (or isotype Ctrl Ab) (C) and OVA-specific IFN-γ secretion was measured in the draining lymph nodes.

[0060] (D) Immunization with DX-treated MCA205 and rechallenge with a tumorigenic dose of live MCA205 were performed at day 0 and day 7 respectively in mouse with various genetic backgrounds (as indicated). The percentages of tumor free mice were scored at different time points. A representative experiment out of two is depicted including 6-10 mice/group.

[0061] *p<0.05, **p<0.01.

[0062] FIG. 5. The therapeutic activity of anthracyclines depended upon Vγ4/6γδ T cells.

[0063] Established MCA205 were treated locally with DX in various genetic backgrounds (A, C) or in WT mice in addition to systemic administration of neutralizing antibodies anti-CCL20 (or isotype Ctrl Ab) (B).

[0064] (D) A kinetic measurement of tumor sizes is plotted as means±SEM. A representative experiment out of two yielding identical results is shown.

[0065] *p<0.05, **p<0.01, ***p<0.001.

[0066] FIG. 6. A DC/γδT cell cross-talk leading to IL-1,3-dependent IL-17 production.

[0067] (A-B) Cocultures of naïve LNs derived γδ T (A-B) or TCR δT (A) cells in the presence of recombinant mouse cytokines (1 μg/ml IL-1β or/and IL-23, 5 μg/ml TGF-β, 10 μg/ml IL-6) (A) with or without TCR cross-linking with anti-CD3ε mAb pre-coated plates (5 μg/ml, Clone 145-2C11) (B).

[0068] (C) Triple or double mixed coculture of LNs derived γδ T cells and/or bone marrow-derived DC loaded or not with live or DX-treated MCA205 was monitored for IL-1β and IL-17A release with ELISA test at 48 hrs.

[0069] (D) DX-treated MCA205 loaded DC/γδ T cell cross-talk was also performed in the presence of 20 μg/ml IL-1RA (Amgen) or anti-IL-23 or IL-23R neutralizing antibodies or 10 μg/ml IL-18BP or 20 μM CH-223191. IL-113 and IL-17A release was measured at 48 hrs in ELISA.

[0070] (E) Naïve lymph node cells from C57bl/6 mice were seeded in 96 well plates, stimulated with cytokines indicated with or without anti-CD3 crosslinking in the presence of GolgiStop (BD Bioscience). IL-17 production and CD69 expression with or without CH-223191 are depicted. Graphs depict means±SEM of triplicate wells of cytokine release assessed at 48 hrs in ELISA. A representative experiment out of 3-6 is depicted in each case.*p<0.05.

[0071] FIG. 7. Adoptive transfer of γδ T cells synergize with chemotherapy under condition that γδ T cells express IL-1R1.

[0072] (A) Tumor growth after an adoptive transfer of LN derived γδ T or TCRγ⁻ T cells into tumor beds two days after local DX treatment in established MCA205 sarcoma.

[0073] (B) The synergistic effects between γδT cells and DX were analyzed comparing WT versus IL-1R1^{-/-} γδ T cells. Tumor sizes is plotted as means±SEM for 5 mice/group. A representative experiment out of two yielding identical results is shown. *p<0.05.

[0074] FIG. 8. DX polarizes TILs towards a TH1 and TH17 pattern.

[0075] (A) The precise calculation of fold changes for individual cytokine or chemokine, which was significantly increased at day 8 post-DX, is depicted for Th1− and Th17-like profiles as tested by low density array.

[0076] (B) The impact of AHR pharmacological inhibitor CH-223191 on pro-apoptotic effect of DX or MTX against MCA205 was measured. A reduction in mitochondrial membrane potential indicated by decreased DiOC6(3) fluorescence was used to show cell apoptosis. The experiment was performed twice with identical results.

[0077] FIG. 9. Infiltration of CT26 tumors with Tc1 and γδ T17 cells after therapy with anthracyclines.

[0078] (A) Tumor growth kinetics after treatment of established CT26 colon cancers with PBS or DX. The graph depicts means±SEM of size in 5 tumors per condition.

[0079] (B) Single cell suspensions of CT26 tumors were analyzed by flow cytometry at day 8 post-DX. After gated on live cells, IL-17 production was checked in CD45.2⁺, CD3⁺, CD4⁺, TCR δ⁺ cells compared with their corresponding negative fractions. A typical dot plot is shown.

[0080] (C-D) The percentage of CD8 T cells among TILs and their IFN-γ production (C) and the percentage of γδ T cells among TILs and their IL-17 production (D) were examined in PBS versus DX-treated tumors by flow cytometry. Means±SEM of percentages in 5 tumors/group are indicated.

[0081] (E) Correlation between the percentages of γδ T17 and Tc1 TILs in all CT26 tumors (treated or not) was plotted (each dot representing one tumor).

[0082] *p<0.05, **p<0.01, ***p<0.001.

[0083] FIG. 10. Phenotype of tumor infiltrated γδ T cells after DX therapy.

[0084] Flow cytometry analyses of the γδ T17 cells in the gate of live CD45.2⁺, CD3⁺ T cells invading MCA205 tumors at day 8 post-DX after a staining using the antibodies indicated in the Y axis. A typical dot plot analysis is depicted. The experiment has been performed three times yielding identical results.

[0085] FIG. 11. CCR6 does not contribute to the recruitment of γδ T17 in tumors.

[0086] Flow cytometry analyses of the γδ T17 cells in the gate of live, CD45.2⁺, CD3⁺ T cells invading MCA205 tumors at day 8 post-DX in WT (upper panel) versus CCR6 loss-of-function mice (lower panel).

[0087] A typical dot plot analysis is depicted with means±SEM for 5 mice.

[0088] FIG. 12. IL-6 and TGF-β failed to play a role in the immunogenicity or therapeutic effects of anthracyclines.

[0089] (A) Established CT26 colon cancer was treated with doxorubicin (DX) in the presence of systemic administration of neutralizing anti-IL-6 Antibody (or isotype Control Antibody). Kinetic tumor growth with 5 animals/group was shown.

[0090] (B). Mice were immunized with DX treated CT26 on the right flank and concomitantly challenged with live CT26 tumor cells on the opposite flank at day 0. In parallel, anti-TGF-β or a control peptide (100 μg/mouse) were administered systemically from day 0 to 10. Kinetic tumor growth with 5 mice/group is shown for one representative experiment. The experiment has been performed twice yielding identical results. *p<0.05, **p<0.01, ***p<0.001.

[0091] FIG. 13. The single-nucleotide polymorphism (SNP) R554K or Arg554Lys (rs2066853) in AHR gene affects the efficacy of conventional anti-cancer therapy in a neoadjuvant setting (before surgery) in breast cancer patients treated with anthracyclines (n=239).

[0092] The proportion of pathological complete responses was compared in wild-type and mutated groups of patients. The Chi square test was used to test the genetic association between the primary endpoint and the AHR-R554Ks SNP.

[0093] FIG. 14. Oxaliplatin induced CRT exposure.

[0094] U2OS cells stably expressing CRT-GFP treated with 1 μM mitoxantrone (MTX) 150 μM cisplatin (CDDP) or 300 μM oxaliplatin (OXP) for the indicated time have been analyzed by means of automated image acquisition and automated analysis. Data is depicted as (A) representative images (B) and normalized CRT-GFP granularity values as well as percent of cells exhibiting nuclear shrinkage. The data is depicted as mean±s.e.m. of quadruplicates from a representative experiment. (C) Immunofluorescene was conducted on CRT-GFP expressing cells by means of staining with anti-CRT antibody and subsequent confocal image acquisition. (D) CRT has been cloned in frame n-terminal to a HaloTag® sequence followed by a KDEL ER retention signal. (E) The impermeable HaloTag® ligand forms covalent bonds exclusively with surface exposed HaloTag®-CRT fusion protein, whereas intracellular HaloTag®-CRT remains undetected.

[0095] FIG. 15. Mitochondrial cell death upon treatment with oxaliplatin and cisplatin. U2OS cells stably expressing CRT-GFP treated with 1 μM mitoxantrone (MTX) 150 μM cisplatin (CDDP) or 300 μM oxaliplatin (OXP) have been acquired by means of an automated microscope and subsequently subjected to automated analysis. The data is depicted as representative images (A) and (B) normalized Bax-GFP granularity values.

[0096] The data represents mean±s.e.m. of quadruplicates from a representative experiment.

[0097] (C, D) U2OS cells were treated with the indicated drugs at the indicated concentrations.

[0098] 16 h after treatment, cell death was monitored by simultaneous staining with 3,3 dihexyloxacarbocyanine iodide (DiOC₆(3)) and propidium iodide (PI), and the percentage of dying (DiOC₆(3)^{low} PT, open bars) and dead (DiOC₆(3)^{low} PI⁺, closed bars) cells was determined by cytofluorometry.

[0099] The data represents means±s.e.m. of triplicate determinations.

[0100] FIG. 16. Oxaliplatin and cisplatin induced ATP release.

[0101] Cells were treated with mitoxantrone (MTX), oxaliplatin (OXP), or cisplatin (CDDP) at the indicated concentrations. 16 h post-treatment, the intracellular ATP was stained with quinacrine and the nuclei were counterstained with Hoechst 33342. The vital dye propidium iodide (PI) was used to visualize dead cells before acquisition by (A) automated fluorescence microscopy or (B) cytofluorometric analysis. In addition, the concentrations of intracellular (C) and extracellular (D) of ATP were monitored.

[0102] Results are means±SEM of triplicate determinations.

[0103] FIG. 17. OXP-, but not CDDP-induced ER stress markers.

[0104] Cells stably expressing G3BP-GFP or GFP-LC3 were treated for 4 h with 1 mM sodium arsenate heptahydrate (NaHAsO₄) or 10 μM rapamycin for 8 h as positive controls respectively. In addition the cells have been treated with 150 μM cisplatin (CDDP) or 300 μM oxaliplatin (OXP) for the indicated time to assess (A, B) the formation of stress granules and (C, D) the lipidation of LC3 as an indicator for autophagy. Representative images (A, C) and mean granularity values (B, D) of quadruplicates are shown.

[0105] (E) The phosphorylation status of eIF2α has been assessed by immunobloting against the phosphoneoepitope Ser51 of eIF2α by means of a monoclonal antibody. A polyclonal antibody has been used to visualize whole eIF2α protein levels.

[0106] FIG. 18. Thapsigargin restores CRT exposure in the presence of cisplatin.

[0107] Compounds from the ICCB known bioactive compounds library have been tested for their capacity to induce CRT-exposure. The library compounds were added at a concentration range from 90 nM to 48 μM in the presence (A) or absence (C) of 50 μM cisplatin (CDDP). The cells were incubated for 4 h and were acquired by means of automated microscopy. The data is depicted as dot plots and representative images (B).

[0108] To eliminate background produced by other library compounds the data from the library screen in the presence of cisplatin was plotted against data from a screen in the absence of CDDP. Mean as well as 95% percentile is depicted and the data represents doublets from two independent experiments.

[0109] (D) CRT exposure has been measured 4 h upon application of the indicated dose range of thapsigargin (THAPS) with and without 50 μM CDDP. Samples have been acquired in quadruplicates from 3 independent experiments and data is depicted as mean±s.e.m.

[0110] FIG. 19. Thapsigargin restores CRT-exposure of cisplatin treated cells in vitro and anti cancer immunogenicity in vivo.

[0111] (A, B) U2OS or HaloTag®-CRT stably expressing U2OS cells were assessed after a treatment with mitoxantrone (MTX), oxaliplatin (OXP), cisplatin (CDDP), thapsigargin (THAPS) or cisplatin combined with thapsigargin by immunofluorescence staining or incubation with impermeable fluorescent HaloTag® ligand respectively followed by flow cytometric analysis. CRT exposure upon combination of 150 μM CDDP with 1 μM THAPS was confirmed in (C) mouse lewis lung cell carcinoma, (D) CT26 and (E) MCA205 cells by means of immunostaining and following flow cytometric analysis.

[0112] (F) MCA205 cells have been used for tumor vaccination in vivo. Treated cells have been inoculated subcutaneously into the flank of C56BL/6 mice. The mice have been rechallenged after 6 days with living cells and the tumor growth is depicted in the survival plot (n=10).

[0113] FIG. 20. THAPS exhibits no additional cytotoxicity.

[0114] (A) U2OS cells were treated with the indicated drugs in the presence or absence of thapsigargin (THAPS) at the indicated concentrations. 16 h after treatment, cell death was monitored by simultaneous staining with 3,3 dihexyloxacarbocyanine iodide (DiOC₆(3)) and propidium iodide low (PI), and the percentage of dying (DiOC₆(3)^{low} PI⁻, open bars) and dead (DiOC₆(3)^{low} PI⁺, closed bars) cells was determined by cytofluorometry.

[0115] The data represents means±s.e.m. of triplicate determinations.

[0116] (B, C) U2OS cells were treated with mitoxantrone (MTX), oxaliplatin (OXP), or cisplatin (CDDP) with and without THAPS at the indicated concentrations. 16 h post-treatment, the intracellular ATP was stained with quinacrine and the nuclei were counterstained with the Hoechst 33342. The vital dye propidium iodide (PI) was used to visualize dead cells before acquisition by (B) automated fluorescence microscopy or (C) cytofluorometric analysis.

[0117] In addition, the concentrations of intracellular (D) and extracellular (E) of ATP were monitored. Results are means±SEM of triplicate determinations.

[0118] FIG. 21. “CRT screen”

[0119] Compounds from the US drug compound library have been tested for their capacity to induce CRT-exposure. The library compounds were tested at a final concentration of 1 μM in CRT-GFP, H2B-RFP stably expressing U2OS cells. The cells were incubated for 4 h and were acquired by means of automated microscopy. The data is depicted as dot plots representing normalized mean values (n=4).

[0120] FIG. 22. Study profile

[0121] The Support Vector Machine (SVM) analyses were performed with the MEV software version 4.5. The LOOCV approach was used as SVM process to estimate the prediction accuracy of the molecular classifiers. The relevance of these classifiers was then tested with univariate (Fisher's exact test) and multivariate (logistic regression and ROC curves) methods.

[0122] FIG. 23. <<Calreticulin pathway>> molecular classifiers based on 5 to 3 genes are detected in the two anthracycline treated cohorts (FEC) but not in the taxane treated cohort (TET).

[0123] The prediction accuracy of each molecular classifier was assessed by Fisher's exact test on the <<pCR vs non pCR>> contingency tables obtained from the LOOCV approach of SVM procedure. The SVM training parameters used were a polynomial kernal matrix with a diagonal factor of 1.3. The predictive value of the classifier was also evaluated by the sensibility (Se) and specificity (Spe) parameters. The “calreticulin pathway” was represented by an initial set of 43 genes in the cohort HOUSTON FEC and 53 genes in the cohort IGGO FEC/TET.

[0124] FIG. 24. Three genes based−<<Calreticulin pathway>> molecular classifiers are independant predictive factors in the two anthracyclines treated cohorts (FEC) but not in the taxane treated cohort (TET).

[0125] A. Multivariate analyses using logistic regression were performed in each cohort to test the association of the molecular classifier with a pathological complete response (pCR) by taking into account the effects of classical clinical factors. The HOUSTON FEC cohort was matched on oestrogen receptor status. The IGGO FEC and TET cohorts were restricted to patients with oestrogen-receptor-negative tumours.

[0126] B. ROC curves were used to test the quality of the predictions.

[0127] C. The under-expression (down) or over-expression (up) of genes in the classifiers between pCR and non pCR groups are mentioned with the respective p-values of non parametric Mann-Whitney test. Adj P-value: adjusted P-value; 95% CI: 95% confidence interval; AUC: area under ROC curve.

[0128] FIG. 25. Search of a common <<Calreticulin pathway>> molecular classifier between the two anthracyclines treated cohorts (FEC).

[0129] A. The genes were classified by decreasing value according to the non parametric Mann-Whitney test used to compare the gene expressions between pCR and non-pCR groups.* These genes are represented by median values of replicates.

[0130] B. The p-values of genes from anthracyline-treated cohorts (FEC) were plotted. The common molecular classifier was constructed with the candidate genes located in the grey areas.

[0131] FIG. 26. The common 3 genes based—<<Calreticulin>> molecular classifier is an independant predictive factor in the two anthracyclines treated cohorts (FEC) but not in the taxane treated cohort (TET).

[0132] A. The prediction accuracy of the common molecular classifier was assessed by Fisher's exact test on the <<pCR vs non pCR>> contingency tables obtained from the LOOCV approach of SVM procedure. The SVM training parameters used were a polynomial kernal matrix with a diagonal factor of 2. The predictive value of the classifier was also evaluated by the sensibility (Se), specificity (Spe), positive and negative predictive values (PPV and NPV) and accuracy parameters.

[0133] B. Multivariate analyses using logistic regression were performed in each cohort to test the association of the common molecular classifier with pathological complete response (pCR) by taking into account the effects of classical clinical factors.

[0134] C. The under-expression (down) or over-expression (up) of genes in the common classifier between pCR and non pCR groups are mentioned. * The gene expression differences were statistically significant between the pCR and non-pCR groups.

[0135] FIG. 27. A molecular parameter signature (also herein identified as “algorithm”) that integrates the “CALR pathway” signature and a MTHFR SNP is particularly efficient to predict the ability of a given subject to respond to anthracyclines in the HOUSTON FEC cohort.

[0136] Multivariate analyses using logistic regression and ROC curves were performed to assess the prediction accuracy of four different models of classifiers.

[0137] FIG. 28: Cardiac Glycosides emit immunogenic signals.

[0138] Compounds from the US Drug library have been tested for their capacity to induce CRT-exposure, HMGB1 release and ATP release.

[0139] (A) The library compounds were added at a concentration of 1 μM and U2OS cells were incubated for 4 h, 15 h or 24 h and CRT-GFP, HMGB1-GFP and quinacrine signal was acquired by means of automated microscopy respectively. The data is depicted as rank scored heat map (A).

[0140] (B,C) CRT exposure has been measured 4 h upon application of the indicated drugs using laser confocal line scanning microscopy. A minimum of 500 cells have been analysed per sample and data is depicted as mean±s.e.m.

[0141] (D) Cardiac glycosides at 1 μM have been analysed for CRT exposure by means of anti-CRT surface staining and FACS quantification.

[0142] (E) NAC and GSH pretreated U2OS cells were analyzed for CRT exposure by FACS and inhibition of reactive oxidative species abolished CRT exposure.

[0143] (F) U2OS cells treated with the indicated doses of Digoxin and Digitoxin were analyzed for CRT exposure by means of FACS quantified surface staining.

[0144] (G) HMGB1 release was measured using HMGB1 ELISA 24 h after treatment in the supernatants of cells.

[0145] (H) ATP release was quantified by ENLITE 15 h after treatment in the supernatant of cells.

[0146] FIG. 29: Digoxin restores anti cancer immunogenicity in vivo.

[0147] (A) U2OS, CT26 and MCA cells have been treated for 24 h with the indicated concentration of drugs, and cell death has been assessed by measuring Annexin/DAPI by mean of FACS

[0148] (B) CRT exposure was analysed in the cells that were single or cotreated as indicated by means of CRT surface staining and FACS quantification.

[0149] (C) MCA205 cells have been used for tumor vaccination in vivo. Cells treated over night (O/N) with 1 μM MTX, 20 μM MitoC with or without 30 μM Digoxin have been inoculated subcutaneously into the flank of C56BL/6 mice. The mice have been rechallenged after 6 days with living cells and the tumor growth is depicted in the survival plot (n=10). Digoxin used as single treatment caused tumor growth on the vaccination side and did not preclude the living cells from forming a tumor after rechallenge.

[0150] (D) D1: Overall survival of 150 breast cancer patients. 50 digoxin cotreated patients are opposed by 100 non digoxin treated controls.

[0151] Subgroup analysis depict anthracycline based chemotherapy with and without digoxin cotreatment and non anthracycline based therapy with and without digoxin cotreatment.

[0152] D2: Overall survival of 60 breast cancer patients anthracycline based chemotherapy. 20 digoxin cotreated patients are opposed by 40 non digoxin treated controls.

[0153] D3: Overall survival of 90 breast cancer patients non anthracycline based therapy. 30 digoxin cotreated patients are opposed by 60 non digoxin treated controls.

[0154] FIG. 30: The single-nucleotide polymorphism (SNP) in NLRP4 (rs302453) affects the efficacy of conventional anti-cancer therapy in terms of pathological complete response (pCR) in a neoadjuvant setting in breast cancer patients (n=443).

[0155] The NLRP4-rs302453 Gln925Leu polymorphism was genotyped in three cohorts (REMAGUS, Dijon, Houston).

[0156] A) The meta-analysis combining the results of the three studies revealed that the proportion of pathological complete responses was higher in NLRP4-rs302453 mutated group than in wild-type group of patients treated with anthracyclines. The Chi2 test was used.

[0157] B) The association between the NLRP4-rs302453 SNP and the pCR phenotype was confirmed by multivariate analyses using logistic regression by taking into account the effects of classical clinical factors. The NLRP4-rs302453 SNP appeared independently associated to pCR. The adjusted p-value, the odd ratio (OR) and the 95% confidence interval are displayed.

[0158] FIG. 31: The single-nucleotide polymorphism (SNP) in NLRP4 (rs302453) affects the efficacy of conventional anti-cancer therapy in terms of metastasis free survival in a neoadjuvant setting in breast cancer patients (n=441).

[0159] The meta-analysis combining the results of three survival studies based on univariate (A) and multivariate (B) approaches in REMAGUS, Dijon and Houston cohorts revealed that the NLRP4-rs302453 was associated with a lower frequency of metastasis in patients carrying the NLRP4 Gln925Leu mutated allele than in patient carrying the normal allele. The Log Rank test was used in the univariate analysis. The Kaplan-Meier curves are displayed (A). A Cox model was used in the multivariate analysis. The adjusted p-value, the odd ratio (OR) and the 95% confidence interval are displayed (B).

[0160] FIG. 32: Using a non biaised selection of immune SNPs associated with shorter time to progression among a multiplex 356 SNP genotyping based on fluorescent PCR (Veracode Illumina) in a cohort of 280 N+ adjuvant BC patients and 360 neoadjuvant BC, inventors identified two additional SNPs (located in DDX58/RIG-I and CX3CR1 encoding a cytosolic receptor detecting viral nucleic acids, and fractalkine respectively) in adjuvant and two highly significant SNPs in neoadjuvant (MTHFR: rs1801133 and FAT2: rs1432862) in a multivariate Cox model (integrating proliferation index and HR status).

[0161] FIG. 33: The single-nucleotide polymorphism (SNP) in DDX58, CX3CR1 and FAT2 affects the efficacy of conventional anti-cancer therapy.

[0162] (A) Cross-validated accuracy and AUC for the three families of signatures, as a function of the number of factors in the signature, for the RCH endpoint

[0163] (B) ROC curves for the RCH signature trained on HOUSTON and tested on REMAGUS. Inventors compare the purely clinical signature (left) to the clinical +2 SNP signature (right)

[0164] (C) AUC (left) and accuracy (right) of the signatures of various sizes trained on HOUSTON, and tested on REMAGUS.

[0165] (D) Predictive value of DDX58 and FAT2 in a third independent cohort (Dacier cohort) of neoadjuvant breast cancer (BC) as predictive factors of disease free survival.

[0166] FIG. 34: Experimental Setting

[0167] FIG. 35: Genes regulated 2 and 8 days after doxorubicin treatment.

[0168] (A) Rsad2, Dhx58, Ifi205, I112a, Trim30 and Oas2 genes are specifically up-regulated in the CD45+ fraction 2 days after doxorubicin treatment. DX: doxorubicin. (n=6 mice)

[0169] (B) Mx1, Mx2, Ifnb1, Ifit2, I115, Irf7 genes are specifically up-regulated in the CD45+ fraction 2 days after doxorubicin treatment. DX: doxorubicin. (n=6 mice)

[0170] (C) Cxc110, Cc12, Cc13, Cc14, Cc17 and Cxcl1 genes are specifically up-regulated in the CD45+ fraction 2 days after doxorubicin treatment. DX: doxorubicin. (n=6 mice)

[0171] (D) Mays, Irf1, Tnf and Irf3 are unchanged in the CD45+ fraction 2 days after doxorubicin treatment. DX: doxorubicin. (n=6 mice)

[0172] FIG. 36: IgA and IgG dosage in sera from Healthy Volunteers (HV) and Breast Cancer Patients (BC). Cut-off values were calculated as 60 AU for IgA anti-CRT antibodies and 90 AU for IgG anti-CRT antibodies.

[0173] FIG. 37: Percentage of positive samples for anti-Calreticulin IgA and IgG in Healthy Volunteers (HV) and Breast Cancer Patients (BC). Cut-off values were calculated as 60 AU for IgA anti-calreticulin antibodies and 90 AU for IgG anti-calreticulin antibodies.

[0174] FIG. 38: The level of 1 g anti-Calreticulin at the diagnosis and the capacity to develop a humoral response during chemotherapy treatment are associated to clinical response to anthracyclines and metastasis free survival. pCR: pathological Complete Response.

[0175] FIG. 39: (A) Immunohistochemistry of ER stress response markers (eif2a phosphorylation, CRT, ERp57 and HMGB1) in BC at diagnosis in FFPE

[0176] (B) The panel is a graph summarizing scoring

[0177] FIG. 40: The core machinery of autophagy is indispensable for ATP release during exposure with immunogenic chemotherapies.

[0178] FIG. 40 upper panel. The percentages of Quinacrine negative cells, assessed by immunofluorescence (GFP emission) represent the proportions of cells that have lost intracellular ATP. The positive control for autophagy induction is starvation.

[0179] FIG. 40 lower panel. ATP release is indirectly measured by the percentages of cancer cells that have lost quinacrine expression.

[0180] FIG. 41: Induction of autophagy in vivo following chemotherapy of established tumors. Redistribution of LC3-GFP in autophagosomes can be visualized post-therapy with both cytotoxic agents (mitoxanthrone MTX and oxaliplatin) as shown in representative micrograph pictures (upper panels). The lower panel is a graph summarizing enumeration of autophagosomes positive cells in 10 independent sections per tumor and animal (each dot represents one tumor). Statistical analyses were performed with Anova test (Fisher's exact method) with significant results at p<0.05.

[0181] FIG. 42: Prophylactic immunization with dying tumor cells is impaired when dying cells are autophagy-deficient.

[0182] The % of tumor free animals are shown in the graph and the number of animals per group is indicated (n=20). Statistical analyses were performed with Anova test (Fisher's exact method) with significant results at p<0.05.

[0183] FIG. 43: Compensatory therapy for autophagy deficient cells: apyrase inhibitors restore the immunogenicity of autophagy-deficient dying tumor cells.

[0184] The % of tumor free animals are shown in the graph and the number of animals per group is indicated (n=20). Statistical analyses were performed with Anova test (Fisher's exact method) with significant results at p<0.05.

[0185] FIG. 44: Autophagy-deficient tumors failed to properly respond to chemotherapy unless apyrase inhibitors are coadministered along with chemotherapy.

[0186] Left graphs show that when apyrase inhibitors (AI) are co-administered locally in tumor beds along with chemotherapy (iv inoculated), tumors start to regress with the cytotoxic agent. Monitoring of tumor growth was recorded with a caliper (product of perpendicular diameters) and is depicted for 5 mice/group. Statistical analyses were performed with Anova test (Fisher's exact method) with significant results at p<0.05.

[0187] FIG. 45: TLR4 agonists potentiate the immunogenicity of anthracyclines and oxaliplatine

[0188] PBS treated mice cannot control the tumor growth whereas chemotherapy-treated mice are able to do so. Dendrophilin combined with Chemotherapy increases the control of the tumor growth, meaning that TLR4 agonists potentiate the immunogenicity of anthracyclines and oxaliplatin in 2 tumor models.

[0189] FIG. 46: 4-1BB agonists potentiate the immunogenicity of anthracyclines and oxaliplatine PBS treated mice cannot control the tumor growth whereas chemotherapy-treated mice are able to do so. 4-1BB agonist combined with Chemotherapy increases the control of the tumor growth, meaning that 4-1BB agonists potentiate the immunogenicity of anthracyclines and oxaliplatin in 2 tumor models.

### DETAILED DESCRIPTION OF THE INVENTION

[0190] Inventors have herein discovered an ordered sequence of molecular events in the pathway leading to the immunogenic cell death of tumour cells.

[0191] This pathway may be interrupted at several levels, by the loss of a positive mediator or by the presence of an inhibitor of such a positive mediator. The result of such an interruption will be the absence of reaction of the subject's immune system, in other words, the absence of “immunogenic cell death”.

[0192] Inventors herein below identify particular products the detection of which can be used to determine if a subject will respond or not to a cancer treatment.

[0193] Inventors further herein below provide methods which can be used (i) to determine the presence of an immunogenic response in a subject having a tumor, (ii) to determine the presence or level of exposure of particular proteins on the surface of tumour cells or of immune cells (as herein defined), (iii) to determine the presence or level of expression of particular proteins secreted by tumor cells or immune cells, (iv) to determine the susceptibility of a tumour cell to a cancer treatment, and/or (v) to determine if a subject will respond to a cancer treatment or will be resistant to said treatment.

### “Immunogenic Cell Death”

[0194] Cell death can be classified according to the morphological appearance of the lethal process (that may be apoptotic, necrotic, autophagic or associated with mitosis), enzymological criteria (with and without the involvement of nucleases or distinct classes of proteases, like caspases), functional aspects (programmed or accidental, physiological or pathological) or immunological characteristics (immunogenic or non-immunogenic) (Kroemer et al., 2009).

[0195] Thanks to the advancing comprehension of cellular demise, it has become clear that the textbook equation ‘programmed cell death=apoptosis=caspase activation=non-immunogenic cell death’, although applicable to some instances of cell death, constitutes an incorrect generalization, at several levels (Garg et al., 2009). Thus, necrosis can be programmed both in its course and its occurrence (Vandenabeele et al., 2008). Apoptosis can be lethal without caspase activation, and caspase activation does not necessarily cause cell death (Kroemer and Martin, 2005) Finally, cell death with an apoptotic appearance can be immunogenic (Casares et al., 2005). These examples illustrate the urgent need to strive towards a more detailed comprehension of cell death subroutines.

[0196] Cell death is defined by Casares et al. (2005) as “immunogenic” if dying cells that express a specific antigen (such as the model antigen ovalbumin OVA or a tumor antigen), yet are uninfected (and hence lack pathogen-associated molecular patterns), and are injected subcutaneously into mice, in the absence of any adjuvant, cause a protective immune response against said specific antigen. Such a protective immune response precludes the growth of living transformed cells expressing the specific antigen injected into mice.

[0197] Inventors demonstrate that when cancer cells succumb to an immunogenic cell death (or immunogenic apoptosis) modality, they alert the immune system, which then mounts a therapeutic anti-cancer immune response and contributes to the eradication of residual tumor cells. Conversely, when cancer cells succumb to a non-immunogenic death modality, they fail to elicit such a protective immune response.

### “Anti-Cancer Immune Response”

[0198] The response from the immune system is herein called an “anti-cancer immune response” when it is directed against tumour cells, in particular cancerous cells. The anticancer immune response is allowed by a reaction from the immune system of the subject to the presence of cells, preferably of tumor cells, dying from an immunogenic cell death (as defined previously).

[0199] Preferably, the anti-cancer immune response allows, at least partly, the regression or destruction of the tumor.

[0200] In the context of the present invention, the patient or subject is a mammal. In a particular embodiment, the mammal is a human being, whatever its age or sex. The patient may have a tumor. Unless otherwise specified in the present disclosure, the tumor is a malignant tumor.

[0201] An in vitro or ex vivo method of assessing the sensitivity of a subject having a tumor to a treatment of cancer is herein provided as a particular embodiment. This method comprises a step of detecting the presence of an anticancer immune response of the subject, the absence of an anticancer immune response being indicative of a resistance of the subject to the treatment of cancer.

[0202] Within the context of this invention, “non-responder” or “resistant” refers to the phenotype of a subject who does not respond to a treatment of cancer, in particular to a conventional treatment of cancer as previously defined, i.e. the volume of the tumor does not substantially decrease, or the symptoms of the cancer in the subject are not alleviated, or the cancer progresses, for example the volume of the tumor increases and/or the tumor generates local or distant metastasis. The terms “non-responder” or “resistant” also refer to the phenotype of a subject who will die from the cancer.

[0203] Within the context of this invention, “responder” or “sensitive” refers to the phenotype of a patient who responds to a treatment of cancer, in particular to a conventional treatment of cancer as previously defined, i.e. the volume of the tumor is decreased, at least one of his symptoms is alleviated, or the development of the cancer is stopped, or slowed down.

[0204] A subject who responds to a cancer treatment is, in the sense of the present invention, a subject who typically has a much longer disease free survival chance than a patient who has been identified, with a method as herein described, as resistant to a treatment of cancer. Typically, a subject who responds to a cancer treatment is a subject who will be completely treated (cured). Within the context of this invention, the term pathological complete response (“pCR”) means that the tumor size dramatically decreases under chemotherapy, typically after a neoadjuvant chemotherapy, and then becomes operable or undetectable.

[0205] Typically, a subject who responds to a cancer treatment is a subject who will be completely treated (cured), i.e., a subject who will survive to the cancer [the detected or measured parameter (for example the expression product of gene as herein disclosed) has a beneficial impact on the “overall survival” (OS)].

[0206] A subject who responds to a cancer treatment is also, in the sense of the present invention, a subject who typically has a much longer disease free survival (DFS) or metastasis free survival chance than a patient who has been identified, with a method as herein described, as resistant to a treatment of cancer.

[0207] The sensitivity or susceptibility of a subject to a treatment of cancer indicates whether the subject is “responder” or “non-responder”, in other words whether the subject will or will not, be at least partially treated (tumor growth retardation or regression), preferably be completely treated (cured), by said cancer treatment.

[0208] In a particular and preferred embodiment of the present invention, the subject is typically a subject undergoing a treatment of cancer, in particular a conventional treatment of cancer (preferably chemotherapy and/or radiotherapy). This means that, typically, before assessing the sensitivity of the subject to a particular treatment of cancer, this subject has been exposed to said particular treatment of cancer. The subject may have been exposed to part of a complete conventional treatment protocol, for example to at least one cycle of the all treatment protocol, for example two cycles of the all treatment protocol.

[0209] In another particular embodiment of the present invention, the method of assessing the sensitivity of a subject to a treatment of cancer is applied on a subject who has not been previously exposed to a treatment of cancer. Preferably the serum of such a subject is free of anti-CRT antibodies.

[0210] Methods herein described are predictive methods, i.e., methods capable of assessing the ability of a subject to mount an immune response in the context of an anthracycline, oxaliplatine or X Rays treatment as herein defined and not only prognostic methods, only capable of indicating whether the subject will survive to the cancer or die from the cancer.

[0211] In the context of the present invention, a “conventional treatment of cancer” may be selected from a chemotherapy, a radiotherapy, an hormonotherapy, an immunotherapy, a specific kinase inhibitor-based therapy, an antiangiogenic agent based-therapy, an antibody-based therapy, in particular a monoclonal antibody-based therapy, and surgery.

[0212] The term “conventionally” means that the therapy is applied or, if not routinely applied, is appropriate and at least recommended by health authorities. The “conventional” treatment is selected by the cancerologist depending on the specific cancer to be prevented or treated.

[0213] In the present invention, the cancer is a cancer that is usually or conventionally treated with one of the following therapy: a chemotherapy, a radiotherapy, an hormonotherapy, an immunotherapy, a specific kinase inhibitor-based therapy, an antiangiogenic agent based-therapy, an antibody-based therapy and a surgery.

[0214] The cancer may be any kind of cancer or neoplasia. The cancer is preferably selected from a breast cancer, a prostate cancer, an oesophagus cancer, a colon cancer, a rectal cancer, a kidney cancer, a lung cancer, in particular a non-small cell lung cancer (NSCLC), a thyroid cancer, an osteosarcoma, a gastrointestinal sarcoma (GIST), a melanoma, a leukaemia, in particular an acute lymphoid leukemia, an Hodgkin lymphoma, and a neuroblastoma.

[0215] The tumour cell mentioned in the present invention is a cell obtained from a tumor of a subject suffering from a cancer, in particular from at least one of the previously identified cancers. The tumor cell is preferably selected from a carcinoma, a sarcoma, a lymphoma, a melanoma, a paediatric tumour and a leukaemia tumour.

[0216] It is to be understood that the expression “tumor cells” used to identify cells obtained from a tumor of a subject, is also used, in the present description, to identify circulating tumor cells (in the case of leukaemia for example), cells obtained from a tumor bed, or cells obtained from a metastase.

[0217] An hormonotherapy is a therapy leading to apoptosis or Fas ligands or soluble/membrane bound TRAIL (TNF-related-apoptosis-inducing-ligand) or soluble/membrane bound TNF (tumor necrosis factor) alpha (TNFa). Cancers sensitive to a hormonotherapy are conventionally treated using a compound such as an antiaromatase for example.

[0218] Cancers sensitive to an immunotherapy are conventionally treated using a compound selected for example from IL-2 (Interleukine-2), IFN (Interferon) alpha (IFNa), and a vaccine.

[0219] Cancers sensitive to a specific kinase inhibitor-based therapy are conventionally treated using a compound selected for example from a tyrosine kinase inhibitor, a serine kinase inhibitor and a threonine kinase inhibitor.

[0220] Cancers sensitive to an antibody-based therapy, preferably to a monoclonal antibody-based therapy are conventionally treated using a specific antibody such as for example anti-CD20 (pan B-Cell antigen) or anti-Her2/Neu (Human Epidermal Growth Factor Receptor-2/NEU).

[0221] Preferably, the conventional treatment of cancer is a conventional chemotherapy or a conventional radiotherapy.

[0222] In the context of a conventional radiotherapy, the treatment may consist in exposing the subject to an irradiation selected for example from XR, gamma irradiations and/or UVC irradiations.

[0223] In the context of a conventional chemotherapy, the treatment may use a cytotoxic agent or cell death inducer (chemotherapeutic agent), in particular a genotoxic agent.

[0224] In a particular embodiment of the present invention, the chemotherapeutic agent is an agent selected for example from an anthracyclin, an antimitotic agent (spindle poison such as vincristine or vinblastine), a DNA intercalating agent, a taxane (such as docetaxel, larotaxel, cabazitaxel, paclitaxel (PG-paclitaxel and DHA-paclitaxel), ortataxel, tesetaxel, and taxoprexin), gemcitabine, etoposide, mitomycine C, an alkylating agent, a platin based component such as CDDP and OXP, and a TLR (Toll-like receptor)-3 ligand.

[0225] In a particular embodiment of the present invention, in particular when chemotherapy is administered to the subject before any surgical step, the chemotherapeutic agent is not a taxan, and preferably also not an antimitotic agent.

[0226] Particular anthracyclins may be selected, in the context of the present invention, from DX, daunorubicin, idarubicin and MTX.

[0227] In a particular embodiment of the present invention, the antibody used in an antibody-based therapy is a cytotoxic antibody.

[0228] A particular breast cancer is a breast cancer conventionally treated with anthracyclins, taxanes, Herceptin, anti-PARP (Poly (ADP-ribose) polymerase), anti-PI3K (Phosphoinositide 3-kinase), mTOR (mammalian Target of Rapamycin) inhibitors, navelbine, gemcitabine, antioestrogens, antiaromatases, and/or a TLR-3 ligand, before or after a surgical step to remove breast tumor, preferably before such a surgical step.

[0229] A particular thyroid cancer is a thyroid cancer treated with radioactive iodine or tyrosine kinase inhibitors, preferably RET inhibitors.

[0230] A particular Hodgkin lymphoma is a Hodgkin lymphoma conventionally treated with CHOP [Cyclophosphamide, Hydroxydaunorubicin, Oncovin (vincristine), and Prednisone and/or Prednisolone] or anthracyclines.

[0231] A particular prostate cancer is a prostate cancer conventionally treated with taxanes and XR.

[0232] A particular colon cancer is a colon cancer conventionally treated with OXP and/or the combination of 5-fluorouracil (5 FU) and folinic acid.

[0233] A particular metastatic colon cancer is a metastatic colon cancer conventionally treated with 5 FU and OXP or irinothecan.

[0234] A particular rectal cancer is a rectal cancer conventionally treated with radiotherapy, preferably local radiotherapy, preferably together with CDDP and/or 5 FU.

[0235] A particular oesophagus cancer is an oesophagus cancer treated with CDDP, before or after a surgical step to remove the oesophagus tumor, preferably before such a surgical step, the administration of CDDP being preferably combined to the administration to the patient of a radiotherapy, preferably a local radiotherapy.

[0236] A particular kidney cancer is a kidney cancer conventionally treated with cytokines or anti-angiogenic drugs (sorafenib).

[0237] A particular lung cancer is a lung cancer conventionally treated with XR and platine or Permetrexed (Alimta®).

[0238] A particular early stage NSCLC is an NSCLC conventionally treated with CDDP and/or etoposide, or with taxanes and avastin [anti-VEGF (Vascular endothelial growth factor) antibody].

[0239] A particular osteosarcoma and a preferred GIST are respectively an osteosarcoma and a GIST conventionally treated with anthracyclins, imatinib (Gleevec®) and/or sunitinib.

[0240] A particular melanoma is a melanoma conventionally treated with dacarbazine (DTIC); B-Raf inhibitors (PLX4032); sorafenib and/or temozolomide; electrochemotherapy; or isolated limb perfusion of TNFalpha, in particular of high doses of TNFalpha.

[0241] A particular neuroblastome is a neuroblastome conventionally treated with anthracyclines or alkylating agents, in particular in the context of autologous bone marrow transplantation or of stem cells transplantation.

[0242] A particular acute lymphoid leukemia is an acute lymphoid leukemia treated with anthracyclins, vinblastine and/or vincristine.

[0243] A particular multiple myeloma is a malignant hemopathy treated with anthracyclins, bortezomiv, revlimide, thalidomide and/or an alkylating agent, in particular in the context of autologous bone marrow or stem cell transplantation.

[0244] Conventional treatments of cancer, as described previously, in particular radio- and chemotherapy, are thought to mediate the direct elimination of tumour cells. Although different anti-tumour agents may kill tumor cells through an apparently homogenous apoptotic pathway, they differ in their ability to stimulate the subject's immune system. Indeed, there are circumstances in which anti-cancer therapy can induce a cellular death (immunogenic cell death) eliciting innate and cognate immune responses which in turn mediate part of the anti-tumour effect.

[0245] Inventors herein demonstrate that all cases of complete therapeutic success (cure) involve an immunological component.

[0246] As indicated previously, it is possible to distinguish between conventional treatments of cancer able to induce an immunogenic cell death, herein identified as “conventional immunogenic treatments”, and conventional treatments of cancer which induce or tend to induce a non-immunogenic cell death, herein identified as “conventional non-immunogenic treatments”.

[0247] As indicated previously, most of standard chemotherapies are known to induce a non-immunogenic apoptosis (Zitvogel et al., 2004; Steinman et al., 2004; Lake et al., 2006).

[0248] OXP and anthracyclines in particular induce immunogenic cell death, as do radiotherapy (ionizing radiations), while other agents such as CDDP and alkylating agents tend to induce a non-immunogenic cell death (Casares et al., 2005; Obeid et al., 2007), as do etoposide, 5-FU and mitomycin C.

[0249] A typical in vitro method used to assess the immunogenicity of a particular drug comprises the steps of:

(a) inducing the cell death or apoptosis of mammalian cells (for example cells from the CT26 or MCA205 mouse cell line), typically of mammalian cells capable of expressing calreticulin (CRT), by exposing said mammalian cells to a particular drug, for example 18 hours;
(b) inoculating (for example intradermally) the dying mammalian cells from step (a) in a particular area (for example a flank) of the mammal, typically a mouse, to induce an immune response in this area of the mammal;
(c) inoculating (for example intradermally) the minimal tumorigenic dose of syngeneic live tumor cells in a distinct area (for example the opposite flank) from the same mammal, for example 7 days after step (b); and
(d) comparing the size of the tumor in the inoculated mammal with a control mammal also exposed to the minimal tumorigenic dose of syngeneic live tumor cells of step (c) [for example a mouse devoid of T lymphocyte], the stabilization or regression of the tumor in the inoculated mammal being indicative of the drug immunogenicity.

[0250] Inventors herein demonstrate that a subject having a tumor may however resist even to a conventional immunogenic treatment as previously identified and/or defined.

[0251] Herein provided is therefore an in vitro or ex vivo method of assessing the sensitivity of a subject having a tumor, as previously defined, to a treatment of cancer, in particular to a conventional immunogenic treatment, which method comprises a step of determining the ability of the subject and/or of the tumor to induce an anticancer immune response, the inability of at least one of the subject and of the tumor to induce an anticancer immune response being indicative of a resistance of the subject to the treatment of cancer.

### Immune Cells

[0252] Inventors demonstrate the critical role of subsets of cells from the immune system, herein identified as “immune cells”, which reveal the presence of an anticancer immune response from a subject having a tumor. Preferably, this subject has been exposed to a treatment of cancer, in particular to at least one conventional treatment of cancer.

[0253] In a particular embodiment, a method of assessing the sensitivity of a subject having a tumor to a treatment of cancer is herein provided, wherein the method comprises a step of detecting the presence of immune cells selected in particular from γδ T lymphocytes, dendritic cells and cytotoxic T lymphocytes, in a tumor sample of the subject.

[0254] In a preferred embodiment, the previously described method is applied on a subject who has not been exposed to a treatment of cancer. This method may further be applied to the same subject after said subject has been exposed to a treatment of cancer, in particular to a chemotherapeutic treatment of cancer, preferably to several cycles, for example two, three or four cycles of a complete chemotherapeutic treatment.

[0255] The method may further comprise a step of comparing the presence of immune cells in a tumor sample of the subject before and after exposition of the subject to a treatment of cancer as explained previously.

[0256] This method may be applied in vitro or ex vivo on a biological sample or biopsy from the subject, in particular on a tumor sample or biopsy, on a biopsy of cells from the tumor bed, on cytospins, on cells from a metastase, or on circulating tumor cells.

[0257] The presence of immune cells in the tumor of a subject is indicative of the presence of an anticancer immune response in the subject who has been exposed to a treatment of cancer and reveals the sensitivity of the subject to the treatment of cancer (responder phenotype).

[0258] The absence of immune cells in the tumor of a subject is indicative of the absence of an anticancer immune response in the subject who has been exposed to a treatment of cancer and reveals a resistance of the subject to the treatment of cancer (non responder phenotype).

[0259] The γδ T lymphocytes, the presence of which may be checked in the previously described method, are preferably selected from Vγ4⁺ γδ T lymphocytes (mouse), in particular activated Vγ4⁺ γδ T lymphocytes; Vδ2 (or Vδ1 in humans) T lymphocytes; Vγ6⁺ γδ T lymphocytes, in particular activated Vγ6⁺ γδ T lymphocytes; IL-17 producing γδ T lymphocytes (also herein called “γδ T17 cells”), in particular cells expressing RORγt (RAR-related orphan receptor), AHR (aryl hydrocarbone receptor), IL-23R, IL-17A and/or IL-22; γδ T lymphocytes expressing the IL-1 receptor (IL-1R or IL-1R1); and any combination of the previously mentioned γδ T lymphocytes such as, in particular IL-17 producing—Vγ4⁺ and Vγ6⁺ γδ T lymphocytes, preferably expressing the IL-1R.

[0260] The previously mentioned γδ T lymphocytes populations identify populations of mammalian cells. Human γδ T lymphocytes have Vδ2 (circulating) T lymphocytes but no Vd2 (mucosal) T lymphocytes, contrary to mouse γδ T lymphocytes. Both populations of Vδ2 and Vd2 T lymphocytes are however able to differentiate into VγdT17 cells.

[0261] It is to note that the Vγδ T lymphocytes, in particular those present in tumor beds, have the following phenotype: Ki67⁺, GzB⁺, CD69⁺ and IL-17⁺, when they are activated.

[0262] The dendritic cells, the presence of which may be checked in the previously described method, are preferably selected from myeloid cells (such as monocytic cells and macrophages) expressing langerin, MHC (major histocompatibility complex) class II, CCR2 (chemokine (C—C motif) receptor 2), CX3CR1 and/or Gr1 molecules in mice; myeloid cells expressing CD14, CD16, HLA dR (human leukocyte antigen disease resistance) molecule, langerin, CCR2 and/or CX3CR1 in humans; dendritic cells expressing CD11c, MHC class II molecules, and/or CCR7 molecules; and IL-1β producing dendritic cells.

[0263] The cytotoxic T lymphocytes, the presence of which may be checked in the previously described method, are preferably selected from CD3+, CD4+ and/or CD8+ T lymphocytes, FOXP3 (forkhead box P3) T lymphocytes, Granzyme B/TIA (Tcell-restricted intracellular antigen) T lymphocytes, and Tc1 cells (IFN-γ producing CD8+ T lymphocytes).

[0264] Other immune cells, the presence of which may be checked in the previously described method, are cells expressing a CRT receptor.

[0265] Such immune cells may be selected from cells expressing at least one of the following proteins: LRP1 (Low density lipoprotein receptor-related protein 1, CD91), Ca⁺⁺-binding proteins such as SCARF1 and SCARF2, MSR1 (Macrophage scavenger receptor 1), SRA, CD59 (protectin), CD207 (langerin), and THSD1 (thrombospondin).

[0266] The detection step of the previously identified immune cells can be easily performed according to methods known by the man of the art such as immunochemistry, immunophenotyping, flow cytometry, Elispots assays (Panaretakis T. et al., 2009), classical tetramer stainings (Ghiringhelli F, et al., 2009), intracellular cytokine stainings, (Conforti R et al, 2010).

[0267] In a particular embodiment of the present invention, the step of determining the presence of an anticancer immune response may consist in detecting and/or dosing, in a biological sample of the patient, for example in a blood or serum sample of the patient, the presence (or normal expression) of a particular cytokine, a particular chemokine, and/or of particular antibody, the absence or abnormal expression (in particular an insufficient amount), when compared to a standard expression (for example level of expression), of the particular cytokine, of the particular chemokine and/or of the particular antibody being indicative of an absent or insufficient anticancer immune response.

[0268] The cytokine the presence of which is to be determined according to the previously described method may be selected from IL-1b, IL-7, IL-10, IL-12a, IL-12b, IL-15, IL-17, IL-21, IL-23, IL-27, IL-33, TNFa, LTbeta (lymphotoxin beta), IFNalpha, beta, lambda, gamma, and the following cytokine receptors [ST2/IL1r11, IL-1R1, IL-7r, IL-15Ra, IL-21R, IL-23R, LtbR, AHR, Flt3 (fms-like tyrosine kinase receptor-3, CD135)] and the following transcription factors (RORc, RORgt, FOXP3, Ikaros, Id2, PU-1).

[0269] The chemokine the presence of which is to be determined according to the previously described method may be selected from CCL2 (Chemokine (C—C motif) ligand), CCL20/MIP3A, CCL5/RANTES, CCL7, CCL25, CXCL1, CXCL2, CXCL9/ITAC, CXCL10/IP10, CXCL12/SDF1, CXCL13, CXCL16/Bonzo, CX3CL1/Fractalkine, and their receptors (CXCR1, CXCR2, CXCR4, CXCR5, CXCR6, CCR2, CCR4, CCR5, CCR7, CX3CR1).

[0270] The antibody (Ab) the presence of which is to be determined according to the previously described method may be selected from anti-CRT Ab, anti-NY-ESO1 Ab, anti-LAGE1 Ab, anti-MICA/B Ab, anti-disulfide isomerase ERp5Ab, anti-PARP1 Ab, anti-ZNF707 (zinc finger protein) Ab in combination with PTMA (prothymosin, alpha), anti-CEP78 (centrosomal protein) Ab, anti-ODF2 (outer dense fiber of sperm tail 2) Ab, anti-SDCCAG1 (serologically defined colon cancer antigen 1) Ab, anti-endothelin 1 (ET-1) ligand Ab, anti-endothelin B receptor (ET_{B}R) Ab and anti-Rgs5 (regulator of G protein signalling 5) Ab.

### Immunogenic Cell Death-Associated Molecules Found in the Tumor

[0271] The step of determining the ability of the tumor to induce an anticancer immune response consists in verifying, in the tumor cells (in particular in dying tumor cells, for example cells which have been exposed to a treatment of cancer), the presence of specific features herein disclosed and identified as “immunogenic cell death-associated molecules or signals” or “danger signals”. Inventors herein demonstrate that stressed and dying tumor cells emit a particular pattern of “danger signals”. These immune cell death-associated molecules are either exposed on the surface of dying cells or secreted into the microenvironment. Thus, the combined action of ‘find-me’ signals (for the attraction of phagocytes) and ‘eat-me’ signals (for corps engulfment) together with the release of hidden molecules (which often signal danger and are usually secluded within live cells), influence the switch between silent corpse removal and inflammatory reactions that stimulate the cellular immune response.

[0272] Inventors discovered that some of said immunogenic cell death-associated molecules are inherent to the tumor, i.e., independent from the subject having the tumor or from the treatment the subject may have been exposed to. Others only appear in or around the tumor (for example in a tumor bed) after an exposition of the subject having the tumor to a conventional treatment of cancer.

[0273] Inventors have discovered, in the present invention, that if the tumor cells of the subject do not correctly or normally express a functional immunogenic cell death-associated molecule, such as one of the particular proteins identified below, in particular do not secrete such a molecule or do not expose such a molecule at their surface (or otherwise secrete or expose such a molecule at an abnormal level compared to a standard level), an additional treatment, herein identified as “compensatory immunogenic treatment of cancer”, should be administered to said patient, preferably in addition to a conventional treatment of cancer, to favour a reaction from the immune system against said tumour cells.

[0274] The exposure or secretion can be observed or determined before or after exposition of the subject to a conventional therapy as described previously, preferably after such an exposition, even more preferably before and after such an exposition.

[0275] In a particular embodiment of the present invention, the method of determining the ability of a tumor to induce an anticancer immune response comprises a step of comparing the expression by tumor cells of functional immunogenic cell death-associated molecules before and after exposition of said tumor cells to a treatment of cancer.

[0276] An absent or abnormal (for example insufficient) level of expression of an immunogenic cell death-associated molecule by the tumor cell in response to a cancer treatment, in particular to a conventional one, indicates that the cell will not be, completely or partially, destroyed or eradicated by said cancer treatment.

[0277] In EP2084531, inventors have shown that the pre-apoptotic translocation of intracellular CRT (endo-CRT) to the plasma membrane surface (ecto-CRT) is a key feature of “immunogenic cell death”. They demonstrated that when CRT is exposed on the surface of dying cells, it promotes their destruction by phagocytes such as dendritic cells. Phagocytes then interact with the immune system which is, in turn, responsible for the immune response. Inventors further demonstrated (i) that this effect is amplified when CRT is present in an increased amount on the surface of dying cells and (ii) that CRT is present in an increased amount on the surface of most tumour cells of a subject who has been exposed to a conventional treatment of cancer, in particular a cell death inducer (apoptosis inducer).

[0278] Inventors also showed that the proteins whose expression level and post-transcriptional modification regulate CRT exposure comprise in particular:
[0279] at the level of ceramide metabolism: ceramide synthase, dihydroceramide desaturase, 3-ketosphingane reductase, serine palmitoyltransferase, sphingomyelin synthase, shingomyelinase, ceramidase, ceramide synthase, sphingosine kinase, sphingosine-1-phosphate phosphatase;
[0280] at the level of Bcl-2 proteins: Bax, Bak, Bok, Bcl-2, Bcl-XL, Mcl-1 as well as all the other multidomain or BH3-only proteins from the Bcl-2 family
[0281] at the level of caspase-8 (CASP 8) activation and substrates: FADD (Fas-Associated protein with Death Domain), FLIP (FLICE-inhibitory protein), RIP (Receptor-interacting protein), TRADD (Tumor necrosis factor receptor type 1-associated DEATH domain), BAP31 (B-cell receptor-associated protein 31);
[0282] at the level of the endoplasmic reticulum (ER) stress response: elF2alpha (eIF2A), phosphorylated elF2alpha, CRT, ERp57, GCN2, HRI, PERK, PKR, PP1, GADD34, IRE1, PERK, HMGB1 and ATF6, BiP;
[0283] at the level of the CRT translocation machinery: CRT, ERp57, KARS (lysyl-tRNA synthetase, LysRS), and KDEL receptor (Lys-Asp-Glu-Leu endoplasmic reticulum protein retention receptor).

[0284] In the context of the present invention, the step of determining the ability of the tumor to induce an anticancer immune response may for example consist in verifying the correct expression, by tumour cells, of a protein allowing or enhancing CRT exposure at the surface of the cells (herein considered as an immunogenic cell death-associated molecule or immunogenic cell death marker). Such a protein may be anyone of the previously described proteins.

[0285] For example, such a protein may be selected in particular from CRT, CCL3 (MIP-1-alpha) (SEQ ID NO: 456); CCR1 (MIP1 alpha receptor, RANTES-R) (SEQ ID NO: 457); CCR2 (MCP-1 receptor) (SEQ ID NO: 458); IL-8 (C—X—C motif chemokine 8) (SEQ ID NO: 459); CXCR1 (IL-8 Receptor type 1) (SEQ ID NO: 460); CXCR2 (IL-8 Receptor type 2) (SEQ ID NO: 461); TNFRSF10A or TRAIL-receptor 1 (SEQ ID NO: 462), TNFRSF10B or TRAIL-receptor 2 (SEQ ID NO: 463), TNFRSF10C or TRAIL-receptor 3 (SEQ ID NO: 464), TNFRSF10D or TRAIL-receptor 4 (SEQ ID NO: 465D), iNOS (Inducible NO synthase) (SEQ ID NO: 466); SOD2 (Superoxide dismutase 2) mitochondriale (SEQ ID NO: 467); E2AK3 (Eukaryotic translation initiation factor 2-alpha kinase 3, PERK) (SEQ ID NO: 468), in particular phosphorylated PERK; E2AK2 (EIF2AK2, Interferon-induced double-stranded RNA-activated protein kinase, PKR) (SEQ ID NO: 469); PP1 (Serine/threonine-protein phosphatases), in particular PP-1A (SEQ ID NO: 470), PP-1B (PPP1CB) (SEQ ID NO: 471) or PP-1G (PPP1CC) (SEQ ID NO: 472); PR15A (Protein phosphatase 1 regulatory subunit 15A, GADD34) (SEQ ID NO: 473); eIF-2A, in particular phosphorylated eIF-2A (SEQ ID NO: 474); SERCA (Sarcoplasmic/endoplasmic reticulum calcium ATPases), in particular SERCA1 (SEQ ID NO: 475), SERCA2 (SEQ ID NO: 476), SERCA3 (SEQ ID NO: 477); MAP kinase 8 (MAPK8 or JNK1) (SEQ ID NO: 478); MAP kinase 9 (MAPK9 or JNK2) (SEQ ID NO: 479); IKBKA (IKK-alpha, IKKA, NFKBIKA, TCF-16) (SEQ ID NO: 480); IKBKB (IKK-beta, IKK2, NFKBIKB) (SEQ ID NO: 481); NEMO (IKBKG, IKK-gamma, IKKAP1) (SEQ ID NO: 482); CASP-1 (IL-1BC, ICE), in particular activated CASP-1 (SEQ ID NO: 483); CASP-8 (MACH, FLICE) (SEQ ID NO: 484), in particular activated CASP-8; FADD (SEQ ID NO: 485); BAP31 (SEQ ID NO: 486) in particular cleaved BAP31; BAX (Bcl2-L-4) (SEQ ID NO: 487); BAK (Bcl2-L-7) (SEQ ID NO: 488); Bcl-2 (SEQ ID NO: 489); Bcl2-L-1 (Bcl-X) (SEQ ID NO: 490); ERp57 (protein disulfide-isomerase A3, PDIA3, ERp60) (SEQ ID NO: 491); and LysRS (SEQ ID NO: 492).

[0286] The step of determining the ability of the tumor to induce an anticancer immune response may also for example consist in verifying the correct expression (as defined previously), by tumour cells, of a protein expressed during the ER stress response and/or during the macroautophagic response of the subject's immune system (identified by inventors as involved in the immunogenic tumor cell death and herein considered as an immunogenic cell death-associated molecules).

[0287] Such a protein may be selected for example from AMBRA1 (Activating Molecule in Beclin-1-Regulated Autophagy), AMPK (5′ adenosine monophosphate-activated protein kinase), ATG1, ATG5, ATG7, ATG10, ATG12, ATG14L (BARKOR), BCLN1 (Beclin 1), BIF1, CaMKK¾ (calcium/calmodulin-dependent protein kinase kinase), DAPK (death-associated protein kinase), DDIT3 (DNA damage inducible transcript 3) (CHOP, GADD153), DRAM (damage-regulated autophagy modulator), FIP200 (RB1CC1), FoxO3 (forkhead box 0 transcription factor), GATE-16 (Golgi-associated ATPase enhancer of 16 kDa), HDAC6 (histone deacetylase 6), HSPA5 (BiP (Binding immunoglobulin protein), GFP78, GP96), XBP1 (X-box binding protein 1), DNAJC3 (DnaJ homolog subfamily C member 3) (p581PK), DNAJB9, DNAJB11, DNAJC10 (DNA sequence corresponding to SEQ ID NO: 527), EDEM1 (ER degradation-enhancing alpha-mannosidase-like 1), EDEM2, EDEM3, FIP200, GABARAP (gamma-aminobutyric acid receptor-associated protein), LAMP-2 (lysosome-associated membrane protein type 2), LC3 (microtubule-associated protein 1 light chain 3) and its isoforms LC3A, LC3B and LC3C, the lipidated form of LC3 (LC3-II), mTOR, SERP1 (Stress-associated endoplasmic reticulum protein 1), SERP2, p62 (sequestosome 1/SQSTM1), PDIA6, PP1R15A (GADD34), Raptor, Rubicon (RUN domain and cysteine-rich domain containing, Beclin 1-interacting) TSC1 (tuberous sclerosis complex 1) and TSC2 (tuberous sclerosis complex 2).

[0288] In a particular embodiment of the present invention, the presence, in a tumor sample of the subject, of an abnormal expression of a gene selected from CCR1, EIF2AK2, DNAJC10, PDIA3, EIF2A, PPP1CB, IKBKB, PPP1CC, and BAX, determines the inability of the subject to induce an anticancer immune response.

[0289] The expression is correct if the expressed protein is active or functional, i.e., in the context of the present invention, if the expressed protein is able to directly or indirectly induce a response from the immune system directed against the tumour cell.

[0290] In a particular method, the expression abnormality is a downregulation of the expression of CCR1, a downregulation of the expression of EIF2AK2, an upregulation of the expression of DNAJC10, and/or an upregulation of the expression of PDIA3.

[0291] In another particular method, the expression abnormality is a downregulation of the expression of CCR1, a downregulation of the expression of EIF2AK2, and an upregulation of the expression of DNAJC10.

[0292] In a further particular method, the expression abnormality is a downregulation of the expression of CCR1, a downregulation of the expression of EIF2AK2, and an upregulation of the expression of PDIA3.

[0293] Methods usable by the man of the art to detect or quantify the previously mentioned proteins are well-known from the skilled man of the art and further identified below in the description.

[0294] When the tumour cells do not express or abnormally express the previously mentioned proteins, inventors herein indicates that a “compensatory immunogenic treatment of cancer” has to be applied to the subject having a tumor to induce a reaction of the immune system directed against said tumor.

[0295] The present disclosure further relates to the abnormal expression of a gene which is specific to tumor cells.

[0296] The step of determining the ability of the tumor to induce an anticancer immune response may also consist in detecting the presence of an altered mutated nucleic acid, of an abnormal expression of the nucleic acid, or of an abnormal expression or activity of the protein encoded by the nucleic acid in a biological sample from the tumor's subject (as defined previously), the presence of said altered nucleic acid, abnormal expression of the nucleic acid, or abnormal expression or activity of the protein encoded by said nucleic acid being indicative of the inability for the tumor to induce an anticancer immune response, in particular when the subject having the tumor has been previously exposed to a treatment of cancer.

[0297] This detection step may indeed be performed before or after the administration to the subject having the tumor of at least part of a treatment of cancer, typically of at least part of a conventional treatment of cancer as previously explained. The detection step is preferably performed after such an administration, for example after one or two cycles of a complete treatment protocol. The nucleic acid, mentioned in the previously described method, the alteration of which, abnormal expression of which, or the abnormal expression of the corresponding endogenous protein (protein encoded by said nucleic acid), should be detected, may be a gene encoding a protein selected from Eomes (SEQ ID NO: 493), IFNg (SEQ ID NO: 494), Tbx21 (Tbet) (SEQ ID NO: 495), IL-1R1 (SEQ ID NO: 496), FOXP3 (SEQ ID NO: 497), Ltb (SEQ ID NO: 498), LtbR (SEQ ID NO: 499), CXCL12 (SEQ ID NO: 500), CXCL13 (SEQ ID NO: 522), IL-33 (SEQ ID NO: 501), IL1RL1 (ST2) (SEQ ID NO: 502), IL-7r (SEQ ID NO: 503), IL-7 (SEQ ID NO: 504), Cc15 (SEQ ID NO: 505), IL-21 (SEQ ID NO: 506), CXCL10 (IP-10) (SEQ ID NO: 507), CXCL2 (SEQ ID NO: 508), CXCL9 (Mig) (SEQ ID NO: 509), TNF-alpha (TNF-a) (SEQ ID NO: 510), IL-15 (SEQ ID NO: 511), AHR (SEQ ID NO: 1), IL-15ra (SEQ ID NO: 512), IL-1b (SEQ ID NO: 513), CXCL16 (SEQ ID NO: 514), CXCR6 (SEQ ID NO: 523), IL-10 (SEQ ID NO: 515), IL-27 (SEQ ID NO: 516), Ccl7 (SEQ ID NO: 517), IL-23r (SEQ ID NO: 518), CX3CL1 (SEQ ID NO: 519), CCL2 (SEQ ID NO: 520), IL-8 (SEQ ID NO: 521), CXCL11 (ITAC) (SEQ ID NO: 524), CXCR1 (SEQ ID NO: 525), CXCR2 (SEQ ID NO: 526), CCR1 (SEQ ID NO: 457), EIF2AK2 (SEQ ID NO: 469), DNAJC10 (SEQ ID NO: 527), PDIA3 (SEQ ID NO: 491), EIF2A (SEQ ID NO: 474), PPP1CB (SEQ ID NO: 471), IKBKB (SEQ ID NO: 481), PPP1CC (SEQ ID NO: 472), and BAX (SEQ ID NO: 487).

[0298] In a particular embodiment of the present invention, the step of determining the ability of the tumor to induce an anticancer immune response may consist in determining alteration in a gene locus or in the expression of the protein encoded by said gene, in a biological sample of the patient, the presence of such an alteration being indicative of the inability of the tumor to induce an anticancer immune response.

[0299] In a particular embodiment, a method of determining the ability of a tumor to induce an anticancer immune response may comprise the following steps of (a) obtaining from the subject a test sample of tumoral DNA, cDNA or RNA, (b) contacting the test sample with at least one nucleic acid probe, wherein said nucleic acid is complementary to and specifically hybridises with a targeted altered nucleic acid sequence (one of the previously identified sequence) preferably comprising at least one point mutation, in particular a single nucleotide polymorphism (SNP), to form a hybridization sample, (c) maintaining the hybridization sample under conditions sufficient for the specific hybridization of the targeted nucleic acid sequence with the nucleic acid probe to occur, and (d) detecting whether there is specific hybridization of the altered targeted nucleic acid sequence with the nucleic acid probe.

[0300] Particular techniques the aim of which is to determine the abnormal (in particular low or absent) expression of a particular nucleic acid such as those described previously, or the abnormal expression of the corresponding endogenous protein (protein encoded by said nucleic acid) are detailed later in the description.

[0301] In a particular embodiment, if the tumor of a subject is not able to induce an anticancer immune response, the subject will be identified as resistant to conventional treatments of cancer.

[0302] Inventors herein demonstrate that a “compensatory immunogenic treatment of cancer” as disclosed in the present description should be administered, preferably in addition to a conventional treatment of cancer, to such resistant subjects having a tumor which is not able to induce an efficient anticancer immune response, in order to allow such a response.

### Immunogenic Cell Death-Associated Products Found in the Subject

[0303] Inventors herein demonstrate that the immunogenic cell death is also dependant from products, herein identified as “immunogenic cell death-associated products or signals”, specific to the mammal, in particular to the human, i.e., independent from the presence of a tumor in the mammal subject, and independent from any treatment a mammal subject having a tumor may have been exposed to.

[0304] The step of determining the ability of the subject to induce an anticancer immune response may consist in detecting, using one of the previously identified methods (well known by the man skilled in the art), the presence of a mutated nucleic acid, of an abnormal expression of the nucleic acid, or of an abnormal expression or activity of the protein encoded by the nucleic acid in a biological sample (as defined previously) from the subject, the presence of said mutated nucleic acid, abnormal expression of the nucleic acid, or abnormal expression or activity of the protein encoded by said nucleic acid, being indicative of the inability for the subject to induce an anticancer immune response.

[0305] In a particular embodiment, if the subject is not able to induce an anticancer immune response, the subject will be identified as resistant or non-responder to conventional treatments of cancer as defined previously.

[0306] In a particular embodiment, a method of determining the ability of a subject to induce an anticancer immune response may comprise the following steps of (a) obtaining from the subject a test sample of DNA, preferably of genomic DNA, (b) contacting the test sample with at least one nucleic acid probe, wherein said nucleic acid is complementary to and specifically hybridises with a targeted mutated nucleic acid sequence (one of the below identified sequences) comprising a point mutation, preferably a single nucleotide polymorphism (SNP), to form a hybridization sample, (c) maintaining the hybridization sample under conditions sufficient for the specific hybridization of the targeted nucleic acid sequence with the nucleic acid probe to occur, and (d) detecting whether there is specific hybridization of the mutated targeted nucleic acid sequence with the nucleic acid probe.

[0307] If the subject has a tumor, the previously described detection step may be performed before and/or after any conventional treatment of cancer.

[0308] In a preferred embodiment, the step of determining the ability of a subject to induce an anticancer immune response may consist in detecting an abnormal nucleic acid sequence in a biological sample from the subject, the detection of such an abnormal nucleic acid sequence determining the inability of the subject to induce an anticancer immune response.

[0309] The method may in particular consist in verifying the presence, in the genome of the subject, of a mutated nucleic acid sequence leading to the abnormal expression of a gene involved in the “anti-cancer immune response”, the presence of such a mutated nucleic acid sequence determining the inability of the subject to induce an anticancer immune response. These genes are herein identified under the term “immune genes”.

[0310] The nucleic acid, mentioned in the previously described methods, is typically located in an immune gene as defined previously and identified below.

[0311] In the context of the present invention, immune genes may be selected from anyone of the genes identified below in Table 1. Table 1 further identifies, for each immune gene, SNP(s) associated to a non-responder status of the subject (in other words, to the inability of the subject to induce an anticancer immune response).

[0312] In the below table the expression “A/G” for example, means that a guanine has been substituted to an adenosine.

TABLE 1

| | Alteration/SNP | | | |
|---|---|---|---|---|
| Gene | reference | Polymorphism | Sequence reference | Coding status |
| NLRP4 | rs12462372 | A/G | SEQ ID NO: 141 | NONSYN |
| DDX58 | rs12006123 | A/G | SEQ ID NO: 136 | 3UTR |
| CX3CR1 | rs3732379 | C/T | SEQ ID NO: 313 | NONSYN |
| MTHFR | rs1801131 | A/C | SEQ ID NO: 192 | NONSYN |
| FAT2 | rs2053028 | A/C/G/T | SEQ ID NO: 216 | NONSYN |
| IL1RL1 | rs1041973 | A/C | SEQ ID NO: 82 | NONSYN |
| HLA-DMB | rs1042337 | C/T | SEQ ID NO: 83 | SYNON |
| LENG9 | rs10423424 | C/G | SEQ ID NO: 84 | NONSYN |
| TP53 | rs1042522 | C/G | SEQ ID NO: 85 | NONSYN |
| UGT1A8 | rs1042597 | C/G/T | SEQ ID NO: 86 | NONSYN |
| NLRP2 | rs1043673 | A/C | SEQ ID NO: 87 | NONSYN |
| TAPBPL | rs1045546 | A/G | SEQ ID NO: 88 | NONSYN |
| BAT2 | rs1046080 | A/C | SEQ ID NO: 89 | NONSYN |
| MAGEA4 | rs1047246 | C/G | SEQ ID NO: 90 | 5UTR |
| CABYR | rs1049683 | A/C | SEQ ID NO: 91 | NONSYN |
| PHC1 | rs1049925 | C/T | SEQ ID NO: 92 | NONSYN |
| ZNF615 | rs10500311 | A/G | SEQ ID NO: 93 | NONSYN |
| Klkbl4 | rs1052276 | A/C/G/T | SEQ ID NO: 94 | NONSYN |
| SH3RF2 | rs1056149 | C/G | SEQ ID NO: 95 | NONSYN |
| ZNF83 | rs1056185 | A/C/G/T | SEQ ID NO: 96 | NONSYN |
| LRRC23 | rs1057077 | A/T | SEQ ID NO: 97 | NONSYN |
| ATF6 | rs1058405 | A/G/T | SEQ ID NO: 98 | NONSYN |
| IRF7 | rs1061501 | A/G | SEQ ID NO: 99 | SYNON |
| TNFRSF1B | rs1061622 | G/T | SEQ ID NO: 100 | NONSYN |
| MPHOSPH1 | rs1062465 | A/T | SEQ ID NO: 101 | NONSYN |
| ITGAL | rs1064524 | C/T | SEQ ID NO: 102 | NONSYN |
| BRDT | rs10747493 | C/T | SEQ ID NO: 103 | NONSYN |
| ECE1 | rs1076669 | C/T | SEQ ID NO: 104 | NONSYN |
| DDX58 | rs10813831 | A/G | SEQ ID NO: 105 | NONSYN |
| ARMC3 | rs10828395 | A/G | SEQ ID NO: 106 | NONSYN |
| PZP | rs10842971 | A/T | SEQ ID NO: 107 | NONSYN |
| ZNF818 | rs10853858 | A/G | SEQ ID NO: 108 | NONSYN |
| TIGD6 | rs10875553 | A/C/G/T | SEQ ID NO: 109 | NONSYN |
| CTSS | rs2230061 | C/T | SEQ ID NO: 110 | NONSYN |
| IFIH1 | rs10930046 | C/T | SEQ ID NO: 111 | NONSYN |
| LARS | rs10988 | C/T | SEQ ID NO: 112 | NONSYN |
| FAT2 | rs1105168 | A/G | SEQ ID NO: 113 | NONSYN |
| CEP290 | rs11104738 | C/T | SEQ ID NO: 114 | NONSYN |
| FBXO7 | rs11107 | C/T | SEQ ID NO: 115 | NONSYN |
| GNLY | rs11127 | C/T | SEQ ID NO: 116 | NONSYN |
| CCDC110 | rs11132306 | A/G | SEQ ID NO: 117 | NONSYN |
| IL23R | rs11209026 | A/G | SEQ ID NO: 118 | NONSYN |
| HSPB9 | rs1122326 | A/C | SEQ ID NO: 119 | NONSYN |
| CD86 | rs1129055 | A/G | SEQ ID NO: 120 | NONSYN |
| GAK | rs1134921 | A/G | SEQ ID NO: 121 | NONSYN |
| SP110 | rs1135791 | C/T | SEQ ID NO: 122 | NONSYN |
| LEPR | rs1137101 | A/G | SEQ ID NO: 123 | NONSYN |
| GSTP1 | rs1138272 | C/T | SEQ ID NO: 124 | NONSYN |
| IRAK3 | rs1152888 | A/G | SEQ ID NO: 125 | NONSYN |
| BRDT | rs1156281 | A/C | SEQ ID NO: 126 | NONSYN |
| EGF | rs11568943 | A/G | SEQ ID NO: 127 | NONSYN |
| EGF | rs11569017 | A/T | SEQ ID NO: 128 | NONSYN |
| MAEL | rs11578336 | G/T | SEQ ID NO: 129 | NONSYN |
| FAM196A | rs11594560 | A/C/G/T | SEQ ID NO: 130 | NONSYN |
| ERCC1 | rs11615 | C/T | SEQ ID NO: 131 | SYNON |
| SIGLEC12 | rs11668530 | A/C/G/T | SEQ ID NO: 132 | NONSYN |
| FCRLA | rs11746 | A/G | SEQ ID NO: 133 | NONSYN |
| NUF2 | rs11802875 | C/T | SEQ ID NO: 134 | NONSYN |
| CASC5 | rs11858113 | C/T | SEQ ID NO: 135 | NONSYN |
| TNXB | rs1009382 | A/C/G/T | SEQ ID NO: 78 | NONSYN |
| PLAC8L1 | rs12187913 | A/T | SEQ ID NO: 137 | NONSYN |
| ZNF816A | rs12459008 | A/T | SEQ ID NO: 138 | NONSYN |
| ZNF665 | rs12460170 | A/G | SEQ ID NO: 139 | NONSYN |
| NLRP11 | rs12461110 | A/C/G/T | SEQ ID NO: 140 | NONSYN |
| SLCO6A1 | rs10055840 | C/G | SEQ ID NO: 77 | NONSYN |
| UGT1A5 | rs12475068 | C/G | SEQ ID NO: 142 | NONSYN |
| IFIH1 | rs12479043 | C/G | SEQ ID NO: 143 | SYNON |
| C5orf20 | rs12520809 | C/T | SEQ ID NO: 144 | NONSYN |
| DDX58 | rs12555727 | A/G | SEQ ID NO: 145 | 3UTR |
| MPHOSPH1 | rs12572012 | A/T | SEQ ID NO: 146 | NONSYN |
| C6orf15 | rs1265053 | C/G | SEQ ID NO: 147 | NONSYN |
| LY75 | rs12692566 | A/C | SEQ ID NO: 148 | NONSYN |
| IL1RL1 | rs12712142 | A/C | SEQ ID NO: 149 | 3UTR |
| GDF3 | rs12819884 | C/T | SEQ ID NO: 150 | NONSYN |
| CCHCR1 | rs130076 | C/T | SEQ ID NO: 151 | NONSYN |
| CCDC36 | rs13068038 | A/C | SEQ ID NO: 152 | NONSYN |
| SLCO6A1 | rs13190449 | A/G | SEQ ID NO: 153 | NONSYN |
| RNF216 | rs13236790 | C/T | SEQ ID NO: 154 | NONSYN |
| TNFRSF10B | rs13265018 | A/C/G | SEQ ID NO: 155 | NONSYN |
| ZNF480 | rs13343641 | C/T | SEQ ID NO: 156 | NONSYN |
| HORMAD1 | rs1336900 | A/G | SEQ ID NO: 157 | NONSYN |
| IL1RL1 | rs13431828 | C/T | SEQ ID NO: 158 | 5UTR |
| LY75 | rs1397706 | A/G | SEQ ID NO: 159 | NONSYN |
| IL1RL1 | rs1420101 | A/G | SEQ ID NO: 160 | intron |
| RELL2 | rs14251 | A/C | SEQ ID NO: 161 | NONSYN |
| FAT2 | rs1432862 | A/G | SEQ ID NO: 162 | NONSYN |
| IL7R | rs1494555 | C/T | SEQ ID NO: 163 | NONSYN |
| IL7R | rs1494558 | A/G | SEQ ID NO: 164 | NONSYN |
| A2ML1 | rs1558526 | A/G | SEQ ID NO: 165 | NONSYN |
| GP6 | rs1613662 | A/G | SEQ ID NO: 166 | NONSYN |
| C6orf205 | rs1634730 | C/T | SEQ ID NO: 167 | NONSYN |
| PCDH12 | rs164075 | A/C/G/T | SEQ ID NO: 168 | NONSYN |
| PCDH12 | rs164515 | A/C/G/T | SEQ ID NO: 169 | NONSYN |
| GP6 | rs1654416 | A/C/G/T | SEQ ID NO: 170 | NONSYN |
| SP100 | rs12724 | A/G | SEQ ID NO: 171 | NONSYN |
| CD180 | rs16875312 | C/G | SEQ ID NO: 172 | NONSYN |
| NME1-NME2 | rs16949649 | C/T | SEQ ID NO: 173 | flanking_5UTR |
| GSTP1 | rs1695 | A/G | SEQ ID NO: 174 | NONSYN |
| CASC5 | rs16970911 | A/G | SEQ ID NO: 175 | NONSYN |
| ZNF615 | rs16983353 | C/T | SEQ ID NO: 176 | NONSYN |
| FCAR | rs16986050 | A/G | SEQ ID NO: 177 | NONSYN |
| PTPRH | rs16986309 | A/C/G/T | SEQ ID NO: 178 | NONSYN |
| TMCO6 | rs17208187 | C/G | SEQ ID NO: 179 | NONSYN |
| SP100 | rs17275036 | A/G | SEQ ID NO: 180 | NONSYN |
| MPHOSPH1 | rs17484219 | G/T | SEQ ID NO: 181 | NONSYN |
| P2RX7 | rs17525809 | C/T | SEQ ID NO: 182 | NONSYN |
| MMP9 | rs17576 | A/G | SEQ ID NO: 183 | NONSYN |
| PSMB9 | rs17587 | A/G | SEQ ID NO: 184 | NONSYN |
| CASC5 | rs17747633 | A/G | SEQ ID NO: 185 | NONSYN |
| SPINK5 | rs17775319 | A/G | SEQ ID NO: 186 | NONSYN |
| LY75 | rs17827158 | C/T | SEQ ID NO: 187 | NONSYN |
| UGT1A8 | rs17863762 | A/G | SEQ ID NO: 188 | NONSYN |
| TLR7 | rs179008 | A/C/T | SEQ ID NO: 189 | NONSYN |
| ICAM1 | rs1799969 | A/G | SEQ ID NO: 190 | NONSYN |
| IL6 | rs1800795 | C/G | SEQ ID NO: 191 | flanking_5UTR |
| C5orf20 | rs1031844 | G/T | SEQ ID NO: 80 | NONSYN |
| ESR1 | rs1801132 | C/G | SEQ ID NO: 193 | SYNON |
| MTHFR | rs1801133 | C/T | SEQ ID NO: 194 | NONSYN |
| ERBB2 | rs1136201 | A/G | SEQ ID NO: 195 | NONSYN |
| IL4R | rs1801275 | A/G | SEQ ID NO: 196 | NONSYN |
| CD180 | rs1803440 | C/G | SEQ ID NO: 197 | 3UTR |
| IL4R | rs1805011 | A/C | SEQ ID NO: 198 | NONSYN |
| IL4R | rs1805015 | C/T | SEQ ID NO: 199 | NONSYN |
| IL4R | rs1805016 | G/T | SEQ ID NO: 200 | NONSYN |
| TNXB | rs185819 | A/C/G/T | SEQ ID NO: 201 | NONSYN |
| A2ML1 | rs1860967 | C/T | SEQ ID NO: 202 | NONSYN |
| MFGE8 | rs1878326 | A/C/G/T | SEQ ID NO: 203 | NONSYN |
| IL23R | rs1884444 | G/T | SEQ ID NO: 204 | NONSYN |
| MPHOSPH1 | rs1886996 | C/T | SEQ ID NO: 205 | NONSYN |
| MPHOSPH1 | rs1886997 | A/G | SEQ ID NO: 206 | NONSYN |
| ICOS | rs1978595 | C/T | SEQ ID NO: 207 | flanking_5UTR |
| ZNF615 | rs1978717 | C/T | SEQ ID NO: 208 | NONSYN |
| ZNF761 | rs1984432 | A/G | SEQ ID NO: 209 | NONSYN |
| KLK2 | rs198977 | C/T | SEQ ID NO: 210 | NONSYN |
| IFIH1 | rs1990760 | C/T | SEQ ID NO: 211 | NONSYN |
| MAGEA1 | rs2008160 | A/C/G/T | SEQ ID NO: 212 | NONSYN |
| CLEC4A | rs2024301 | A/T | SEQ ID NO: 213 | NONSYN |
| DPPA3 | rs2024320 | C/G | SEQ ID NO: 214 | NONSYN |
| TAPBPL | rs2041385 | C/T | SEQ ID NO: 215 | NONSYN |
| C6orf10 | rs1033500 | C/T | SEQ ID NO: 81 | NONSYN |
| IL13 | rs20541 | C/T | SEQ ID NO: 217 | NONSYN |
| IL4R | rs2057768 | A/G | SEQ ID NO: 218 | flanking_5UTR |
| FPR1 | rs2070745 | C/G | SEQ ID NO: 219 | NONSYN |
| IL4 | rs2070874 | C/T | SEQ ID NO: 220 | 5UTR |
| BIRC5 | rs2071214 | A/G | SEQ ID NO: 221 | NONSYN |
| MAGEB3 | rs2071309 | C/T | SEQ ID NO: 222 | NONSYN |
| TAPBP | rs2071888 | C/G | SEQ ID NO: 223 | NONSYN |
| AKAP3 | rs2072355 | A/C/G/T | SEQ ID NO: 224 | NONSYN |
| ZBP1 | rs2073145 | A/G | SEQ ID NO: 225 | NONSYN |
| DHX58 | rs2074158 | A/G | SEQ ID NO: 226 | NONSYN |
| DHX58 | rs2074160 | A/G | SEQ ID NO: 227 | NONSYN |
| VARS2 | rs2074506 | A/C | SEQ ID NO: 228 | NONSYN |
| KLK9 | rs2075802 | A/C | SEQ ID NO: 229 | SYNON |
| SIGLEC9 | rs2075803 | A/G | SEQ ID NO: 230 | NONSYN |
| CEBPZ | rs2098386 | A/C/G/T | SEQ ID NO: 231 | NONSYN |
| ZNF347 | rs2195310 | A/G | SEQ ID NO: 232 | NONSYN |
| IL15RA | rs2228059 | A/C | SEQ ID NO: 233 | NONSYN |
| DCC | rs2229080 | C/G | SEQ ID NO: 234 | NONSYN |
| LTA | rs2229094 | C/T | SEQ ID NO: 235 | NONSYN |
| DOCK1 | rs2229603 | A/G | SEQ ID NO: 236 | NONSYN |
| ICAM3 | rs2230399 | C/G | SEQ ID NO: 237 | NONSYN |
| TNFAIP3 | rs2230926 | G/T | SEQ ID NO: 238 | NONSYN |
| GZMB | rs2236338 | A/G | SEQ ID NO: 239 | NONSYN |
| NCR2 | rs2236369 | C/T | SEQ ID NO: 240 | NONSYN |
| EGF | rs2237051 | A/G | SEQ ID NO: 241 | NONSYN |
| DPCR1 | rs2240804 | C/T | SEQ ID NO: 242 | NONSYN |
| LILRA4 | rs2241384 | C/T | SEQ ID NO: 243 | NONSYN |
| Klkbl4 | rs2241414 | A/C/G/T | SEQ ID NO: 244 | NONSYN |
| ATG16L1 | rs2241880 | C/T | SEQ ID NO: 245 | NONSYN |
| SLC44A4 | rs2242665 | A/G | SEQ ID NO: 246 | NONSYN |
| MGC23985 | rs2250145 | A/C/G/T | SEQ ID NO: 247 | NONSYN |
| MMP9 | rs2250889 | C/G | SEQ ID NO: 248 | NONSYN |
| IFNAR1 | rs2257167 | C/G | SEQ ID NO: 249 | NONSYN |
| CYP3A7 | rs2257401 | C/G | SEQ ID NO: 250 | NONSYN |
| SIGLEC9 | rs2258983 | A/C | SEQ ID NO: 251 | NONSYN |
| THG1L | rs2270812 | A/G | SEQ ID NO: 252 | NONSYN |
| NCR2 | rs2273962 | A/G | SEQ ID NO: 253 | NONSYN |
| LEMD1 | rs2274702 | G/T | SEQ ID NO: 254 | intron |
| MMP9 | rs17577 | A/G | SEQ ID NO: 255 | NONSYN |
| FCRLA | rs2275603 | A/G | SEQ ID NO: 256 | NONSYN |
| PZP | rs2277413 | C/T | SEQ ID NO: 257 | NONSYN |
| CCDC33 | rs2277603 | A/G/T | SEQ ID NO: 258 | NONSYN |
| ZNF350 | rs2278420 | A/C/G/T | SEQ ID NO: 259 | NONSYN |
| WDR55 | rs2286394 | A/G | SEQ ID NO: 260 | NONSYN |
| PTPRH | rs2288419 | A/C/G/T | SEQ ID NO: 261 | NONSYN |
| PTPRH | rs2288515 | A/C/G/T | SEQ ID NO: 262 | NONSYN |
| PTPRH | rs2288523 | A/C/G/T | SEQ ID NO: 263 | NONSYN |
| MORC1 | rs2290057 | C/T | SEQ ID NO: 264 | NONSYN |
| RBP5 | rs2290237 | A/T | SEQ ID NO: 265 | NONSYN |
| NOS2A | rs2297518 | A/G | SEQ ID NO: 266 | NONSYN |
| CDX1 | rs2302275 | C/G | SEQ ID NO: 267 | NONSYN |
| SPINK5 | rs2303063 | A/G | SEQ ID NO: 268 | NONSYN |
| THEG | rs2303810 | A/C | SEQ ID NO: 269 | NONSYN |
| FAT2 | rs2304024 | C/T | SEQ ID NO: 270 | NONSYN |
| FAT2 | rs2304053 | A/G | SEQ ID NO: 271 | NONSYN |
| GP6 | rs2304167 | A/C/G/T | SEQ ID NO: 272 | NONSYN |
| ORC4L | rs2307394 | A/G | SEQ ID NO: 273 | NONSYN |
| C19orf51 | rs2365725 | C/T | SEQ ID NO: 274 | NONSYN |
| CASC5 | rs2412541 | G/T | SEQ ID NO: 275 | NONSYN |
| CHRNA2 | rs2472553 | C/T | SEQ ID NO: 276 | NONSYN |
| PTPN22 | rs2476601 | C/T | SEQ ID NO: 277 | NONSYN |
| CCDC69 | rs248427 | A/C/G/T | SEQ ID NO: 278 | NONSYN |
| OLFML2B | rs2499836 | C/T | SEQ ID NO: 279 | NONSYN |
| PCDHA9 | rs251354 | C/G | SEQ ID NO: 280 | NONSYN |
| TRIM31 | rs2523989 | A/G | SEQ ID NO: 281 | NONSYN |
| LILRB3 | rs255772 | C/G | SEQ ID NO: 282 | intron |
| P2RX4 | rs25644 | A/G | SEQ ID NO: 283 | NONSYN |
| CD14 | rs2569190 | A/G | SEQ ID NO: 284 | 5UTR |
| KLK14 | rs2569491 | A/C/G/T | SEQ ID NO: 285 | NONSYN |
| MORC1 | rs2593943 | A/G | SEQ ID NO: 286 | NONSYN |
| CXCL12 | rs266088 | C/T | SEQ ID NO: 287 | intron |
| NCR3 | rs2736191 | C/G | SEQ ID NO: 288 | flanking_5UTR |
| CAGE1 | rs2876098 | G/T | SEQ ID NO: 289 | NONSYN |
| PCDHB12 | rs2910006 | C/T | SEQ ID NO: 290 | NONSYN |
| PCDHB7 | rs2910313 | C/G | SEQ ID NO: 291 | NONSYN |
| KIR2DS4 | rs1130476 | G/T | SEQ ID NO: 292 | NONSYN |
| SLU7 | rs2961944 | A/G | SEQ ID NO: 293 | NONSYN |
| CTLA4 | rs3087243 | A/G | SEQ ID NO: 294 | flanking_3UTR |
| C6orf10 | rs3129941 | A/G | SEQ ID NO: 295 | NONSYN |
| C6orf47 | rs3130617 | C/T | SEQ ID NO: 296 | NONSYN |
| CDSN | rs3130981 | C/T | SEQ ID NO: 297 | NONSYN |
| CDSN | rs3130984 | C/T | SEQ ID NO: 298 | NONSYN |
| LECT2 | rs31517 | A/C/G/T | SEQ ID NO: 299 | NONSYN |
| ETFB | s1130426 | C/T | SEQ ID NO: 300 | NONSYN |
| SELL | rs1131498 | C/T | SEQ ID NO: 301 | NONSYN |
| IL7R | rs3194051 | A/G | SEQ ID NO: 302 | NONSYN |
| SIGIRR | rs3210908 | A/G | SEQ ID NO: 303 | NONSYN |
| ERCC1 | rs3212961 | A/C | SEQ ID NO: 304 | intron |
| PZP | rs3213831 | C/T | SEQ ID NO: 305 | NONSYN |
| TEX15 | rs323344 | A/C/G/T | SEQ ID NO: 306 | NONSYN |
| TEX15 | rs323345 | A/C/G/T | SEQ ID NO: 307 | NONSYN |
| TEX15 | rs323346 | A/C/G/T | SEQ ID NO: 308 | NONSYN |
| TEX15 | rs323347 | A/C/G/T | SEQ ID NO: 309 | NONSYN |
| ZNF528 | rs324125 | A/G | SEQ ID NO: 310 | flanking_5UTR |
| KIAA0141 | rs351260 | C/T | SEQ ID NO: 311 | NONSYN |
| ZNF701 | rs366793 | C/T | SEQ ID NO: 312 | NONSYN |
| P2RX7 | rs10160951 | C/G | SEQ ID NO: 79 | NONSYN |
| CD180 | rs3733910 | A/G | SEQ ID NO: 314 | SYNON |
| FAT2 | rs3734055 | A/C/G/T | SEQ ID NO: 315 | NONSYN |
| SYCE1 | rs3737031 | A/C/G/T | SEQ ID NO: 316 | NONSYN |
| C1RL | rs3742089 | A/G | SEQ ID NO: 317 | NONSYN |
| KIR3DL2 | rs3745902 | C/T | SEQ ID NO: 318 | NONSYN |
| IFIH1 | rs3747517 | A/G | SEQ ID NO: 319 | NONSYN |
| SYCE1 | rs3747881 | A/C/G/T | SEQ ID NO: 320 | NONSYN |
| SLC25A2 | rs3749780 | A/G/T | SEQ ID NO: 321 | NONSYN |
| C6orf10 | rs3749966 | C/T | SEQ ID NO: 322 | NONSYN |
| P2RX7 | rs3751142 | A/C | SEQ ID NO: 323 | SYNON |
| P2RX7 | rs3751143 | G/T | SEQ ID NO: 324 | NONSYN |
| UGT1A5 | rs3755321 | A/G | SEQ ID NO: 325 | NONSYN |
| MPHOSPH1 | rs1129777 | C/G | SEQ ID NO: 326 | NONSYN |
| MPHOSPH1 | rs3758388 | A/T | SEQ ID NO: 327 | NONSYN |
| MPHOSPH1 | rs3758390 | A/G | SEQ ID NO: 328 | NONSYN |
| CYP2C19 | rs3758581 | A/G | SEQ ID NO: 329 | NONSYN |
| NME1-NME2 | rs3760468 | A/T | SEQ ID NO: 330 | flanking_5UTR |
| NME1-NME2 | rs3760469 | G/T | SEQ ID NO: 331 | flanking_5UTR |
| MORC1 | rs3762697 | A/G | SEQ ID NO: 332 | NONSYN |
| IL1RL1 | rs3771175 | A/T | SEQ ID NO: 333 | 3UTR |
| TLR3 | rs3775291 | A/G | SEQ ID NO: 334 | NONSYN |
| PCDHB6 | rs3776096 | C/T | SEQ ID NO: 335 | NONSYN |
| SPINK5 | rs3777134 | C/T | SEQ ID NO: 336 | NONSYN |
| PBK | rs3779620 | A/G | SEQ ID NO: 337 | NONSYN |
| TDRD6 | rs3799277 | C/T | SEQ ID NO: 338 | NONSYN |
| TIRAP | rs3802813 | A/G | SEQ ID NO: 339 | NONSYN |
| TIRAP | rs3802814 | A/G | SEQ ID NO: 340 | SYNON |
| FATE1 | rs3810715 | A/G | SEQ ID NO: 341 | NONSYN |
| Klkbl4 | rs3815803 | A/C/G/T | SEQ ID NO: 342 | NONSYN |
| ATP10A | rs3816800 | C/G | SEQ ID NO: 343 | NONSYN |
| SIGLEC12 | rs3829658 | A/C/G/T | SEQ ID NO: 344 | NONSYN |
| IRAK2 | rs3844283 | C/G | SEQ ID NO: 345 | NONSYN |
| UGT1A5 | rs3892170 | C/G | SEQ ID NO: 346 | NONSYN |
| IL1R1 | rs3917320 | A/C | SEQ ID NO: 347 | SYNON |
| GALC | rs398607 | A/G | SEQ ID NO: 348 | NONSYN |
| FBXL21 | rs40986 | A/G | SEQ ID NO: 349 | NONSYN |
| NOTCH4 | rs422951 | A/C/G/T | SEQ ID NO: 350 | NONSYN |
| IRAK4 | rs4251545 | A/G | SEQ ID NO: 351 | NONSYN |
| CLEC4D | rs4304840 | A/G | SEQ ID NO: 352 | NONSYN |
| SKIV2L | rs437179 | G/T | SEQ ID NO: 353 | NONSYN |
| NLRP4 | rs441827 | C/T | SEQ ID NO: 354 | NONSYN |
| CTLA4 | rs4553808 | A/G | SEQ ID NO: 355 | flanking_5UTR |
| SSX9 | rs4598385 | A/G | SEQ ID NO: 356 | NONSYN |
| FLJ41603 | rs4629585 | A/C | SEQ ID NO: 357 | NONSYN |
| VARS2 | rs4678 | C/T | SEQ ID NO: 358 | NONSYN |
| EGF | rs4698803 | A/T | SEQ ID NO: 359 | NONSYN |
| PCYOX1L | rs4705336 | C/G | SEQ ID NO: 360 | NONSYN |
| C19orf48 | rs4801853 | C/T | SEQ ID NO: 361 | NONSYN |
| ZNF578 | rs4802965 | A/G | SEQ ID NO: 362 | NONSYN |
| SAGE1 | rs4829799 | C/T | SEQ ID NO: 363 | NONSYN |
| TNFRSF10A | rs20575 | C/G | SEQ ID NO: 364 | NONSYN |
| CD14 | rs4914 | C/G | SEQ ID NO: 365 | SYNON |
| AHSG | rs4918 | C/G | SEQ ID NO: 366 | NONSYN |
| LOC283755 | rs4931826 | A/C | SEQ ID NO: 367 | NONSYN |
| SERPINA3 | rs4934 | A/G | SEQ ID NO: 368 | NONSYN |
| CCDC71 | rs4955418 | A/G | SEQ ID NO: 369 | NONSYN |
| CCDC71 | rs4955419 | A/T | SEQ ID NO: 370 | NONSYN |
| TLR4 | rs4986790 | A/G | SEQ ID NO: 371 | NONSYN |
| TLR4 | rs4986791 | C/T | SEQ ID NO: 372 | NONSYN |
| IFNAR2 | rs2229207 | C/T | SEQ ID NO: 373 | NONSYN |
| SELL | rs2229969 | C/T | SEQ ID NO: 374 | NONSYN |
| IL1RL1 | rs4988956 | A/G | SEQ ID NO: 375 | NONSYN |
| IL1RL1 | rs4988957 | C/T | SEQ ID NO: 376 | SYNON |
| IL1RL1 | rs4988958 | C/T | SEQ ID NO: 377 | SYNON |
| TLR4 | rs5030710 | C/T | SEQ ID NO: 378 | SYNON |
| TLR4 | rs5030719 | G/T | SEQ ID NO: 379 | NONSYN |
| FPR1 | rs5030878 | C/T | SEQ ID NO: 380 | NONSYN |
| TLR4 | rs5031050 | A/T | SEQ ID NO: 381 | NONSYN |
| COP1 | rs542571 | A/T | SEQ ID NO: 382 | NONSYN |
| ICAM1 | rs5498 | A/G | SEQ ID NO: 383 | NONSYN |
| KLK1 | rs5516 | C/G | SEQ ID NO: 384 | NONSYN |
| KLK1 | rs5517 | A/C/G/T | SEQ ID NO: 385 | NONSYN |
| C6orf10 | rs560505 | C/T | SEQ ID NO: 386 | NONSYN |
| TLR7 | rs5741881 | A/G | SEQ ID NO: 387 | SYNON |
| CTLA4 | rs5742909 | C/T | SEQ ID NO: 388 | flanking_5UTR |
| NOD2 | rs5743291 | A/G | SEQ ID NO: 389 | NONSYN |
| TLR9 | rs5743846 | A/G | SEQ ID NO: 390 | NONSYN |
| CASP1 | rs580253 | A/C/G/T | SEQ ID NO: 391 | SYNON |
| ITGB3 | rs5918 | C/T | SEQ ID NO: 392 | NONSYN |
| PASD1 | rs5924658 | C/G/T | SEQ ID NO: 393 | NONSYN |
| DDX53 | rs5925720 | G/T | SEQ ID NO: 394 | NONSYN |
| CTCFL | rs6025606 | A/C/G/T | SEQ ID NO: 395 | NONSYN |
| CCND1 | rs9344 | A/G | SEQ ID NO: 396 | SYNON |
| CTCFL | rs6070122 | C/G | SEQ ID NO: 397 | NONSYN |
| CTCFL | rs6070128 | C/G | SEQ ID NO: 398 | NONSYN |
| TMC4 | rs641738 | C/T | SEQ ID NO: 399 | NONSYN |
| SLC44A4 | rs644827 | C/T | SEQ ID NO: 400 | NONSYN |
| SIGLEC12 | rs6509544 | C/G | SEQ ID NO: 401 | NONSYN |
| TNFRSF10A | rs6557634 | C/T | SEQ ID NO: 402 | NONSYN |
| FAT2 | rs6650971 | C/T | SEQ ID NO: 403 | NONSYN |
| SPANXN3 | rs6654212 | C/G | SEQ ID NO: 404 | NONSYN |
| UGT1A4 | rs6755571 | A/C | SEQ ID NO: 405 | NONSYN |
| UGT1A6 | rs6759892 | G/T | SEQ ID NO: 406 | NONSYN |
| CCDC110 | rs6827370 | C/T | SEQ ID NO: 407 | NONSYN |
| MYD88 | rs6853 | A/G | SEQ ID NO: 408 | 3UTR |
| SH3TC2 | rs6875902 | A/C | SEQ ID NO: 409 | NONSYN |
| SPINK5 | rs6892205 | A/G | SEQ ID NO: 410 | NONSYN |
| IL7R | rs6897932 | C/T | SEQ ID NO: 411 | NONSYN |
| HCG9 | rs6904029 | A/G | SEQ ID NO: 412 | NONSYN |
| RPP21 | rs6986 | C/G | SEQ ID NO: 413 | NONSYN |
| IRAK2 | rs708035 | A/T | SEQ ID NO: 414 | NONSYN |
| NCAPD2 | rs714774 | C/G | SEQ ID NO: 415 | NONSYN |
| CASC5 | rs7177192 | C/G | SEQ ID NO: 416 | NONSYN |
| TULP2 | rs7260579 | C/T | SEQ ID NO: 417 | NONSYN |
| LIPI | rs7278737 | G/T | SEQ ID NO: 418 | NONSYN |
| LILRB4 | rs731170 | A/G | SEQ ID NO: 419 | NONSYN |
| CTLA4 | rs733618 | A/G | SEQ ID NO: 420 | flanking_5UTR |
| GSTM3 | rs7483 | A/G | SEQ ID NO: 421 | NONSYN |
| NLRP3 | rs7525979 | C/T | SEQ ID NO: 422 | SYNON |
| TRIM40 | rs757259 | C/T | SEQ ID NO: 423 | NONSYN |
| TRIM40 | rs757262 | A/G | SEQ ID NO: 424 | NONSYN |
| SH3RF2 | rs758037 | C/T | SEQ ID NO: 425 | NONSYN |
| FMR1NB | rs764631 | C/T | SEQ ID NO: 426 | NONSYN |
| CCDC110 | rs7698680 | A/T | SEQ ID NO: 427 | NONSYN |
| CCDC110 | rs7699687 | G/T | SEQ ID NO: 428 | NONSYN |
| TLR4 | rs7869402 | C/T | SEQ ID NO: 429 | 3UTR |
| TLR4 | rs7873784 | C/G | SEQ ID NO: 430 | 3UTR |
| P2RX7 | rs7958311 | A/G | SEQ ID NO: 431 | NONSYN |
| HSP90AA1 | rs8005905 | A/T | SEQ ID NO: 432 | NONSYN |
| ZNF614 | rs8104890 | C/T | SEQ ID NO: 433 | NONSYN |
| ZNF160 | rs8105668 | C/G | SEQ ID NO: 434 | NONSYN |
| BIRC8 | rs8109165 | A/G | SEQ ID NO: 435 | NONSYN |
| TULP2 | rs8112811 | C/T | SEQ ID NO: 436 | NONSYN |
| GZMB | rs8192917 | A/G | SEQ ID NO: 437 | NONSYN |
| SP100 | rs836237 | C/T | SEQ ID NO: 438 | flanking_3UTR |
| TLR7 | rs864058 | C/T | SEQ ID NO: 439 | SYNON |
| FPR1 | rs867228 | A/C | SEQ ID NO: 440 | NONSYN |
| LAG3 | rs870849 | C/T | SEQ ID NO: 441 | NONSYN |
| LOC284297 | rs925878 | A/G | SEQ ID NO: 442 | flanking_5UTR |
| C6orf10 | rs9268368 | C/T | SEQ ID NO: 443 | NONSYN |
| C6orf10 | rs9268384 | A/G | SEQ ID NO: 444 | NONSYN |
| PTPRH | rs9304763 | C/G | SEQ ID NO: 445 | SYNON |
| FLJ41603 | rs9324624 | C/T | SEQ ID NO: 446 | NONSYN |
| FAT2 | rs9324700 | A/C/G/T | SEQ ID NO: 447 | NONSYN |
| ZNF614 | rs9636139 | A/G | SEQ ID NO: 448 | NONSYN |
| ZNF468 | rs9749312 | A/G | SEQ ID NO: 449 | 3UTR |
| SLC36A3 | rs978012 | A/G | SEQ ID NO: 450 | NONSYN |
| NCR3 | rs986475 | C/T | SEQ ID NO: 451 | 3UTR |
| CTAGE1 | rs9946136 | A/C/G/T | SEQ ID NO: 452 | NONSYN |

[0313] Immune genes are preferably selected the NLR family pyrin domain containing 4 (NLRP4/NALP4/PAN2/CT58) gene, DDX58 [DEAD (Asp-Glu-Ala-Asp) box polypeptide 58] or RIG1 gene, the chemokine (C—X3-C motif) receptor 1 (CX3CR1/Fractalkine receptor/CMKBLR1/GPRI3/V28) gene, MTHFR [methylene tetrahydrofolate reductase] (NADPH) gene, FAT2 gene [human fat homolog proto-cadherin Fat2 (of the fly fat gene which is a tumor suppressor gene controlling cell proliferation) localized in 5q33 region], AHR (BHLHE76) gene, the tumor necrosis factor receptor superfamily member 10a (TNFRSF10A/TRAILR1/CD261) gene, the sialic acid binding Ig-like lectin 5 (SIGLEC5/CD170/OBBP2/CD33L2) gene, the CPX chromosome region candidate 1 (CPXCR1/CT77) gene, the IFNG or IFNγ receptor 1 (IFNGR1/CD119) gene, and the myotubularin related protein 15 (MTMR15/KIAA1018).

[0314] Table 2 identifies, for each identified immune gene, SNP(s) associated to a non-responder status of the subject (in other words, to the inability of the subject to induce an anticancer immune response).

TABLE 2

| Gene | Alteration/SNP reference | Polymorphism | Sequence reference | Coding_status |
|---|---|---|---|---|
| NLRP4 | rs302453 | A/T | SEQ ID NO: 60 | NONSYN |
| | rs17857373 | C/G | SEQ ID NO: 61 | NONSYN |
| | rs17857374 | A/C/T | SEQ ID NO: 62 | NONSYN |
| | rs34627915 | A/G | SEQ ID NO: 63 | NONSYN |
| | rs17854614 | A/C | SEQ ID NO: 64 | NONSYN |
| DDX58 | rs17217280 | A/T | SEQ ID NO: 17 | NONSYN |
| | rs35253851 | A/C | SEQ ID NO: 18 | NONSYN |
| | rs951618 | A/G | SEQ ID NO: 19 | NONSYN |
| | rs35527044 | G/T | SEQ ID NO: 20 | NONSYN |
| | rs11795404 | A/C | SEQ ID NO: 21 | NONSYN |
| | rs10813831 | A/G | SEQ ID NO: 22 | NONSYN |
| | rs11899 | C/T | SEQ ID NO: 23 | 3UTR |
| | rs10363 | A/G | SEQ ID NO: 24 | 3UTR |
| | rs10970987 | A/C/G/T | SEQ ID NO: 25 | SYN |
| | rs35050877 | A/C/G/T | SEQ ID NO: 26 | 3UTR |
| | rs12236816 | A/G | SEQ ID NO: 27 | 3UTR |
| | rs12235719 | A/T | SEQ ID NO: 28 | 5UTR |
| CX3CR1 | rs3732378 | A/G | SEQ ID NO: 39 | NONSYN |
| | rs3732380 | C/T | SEQ ID NO: 40 | NONSYN |
| | rs41535248 | G/T | SEQ ID NO: 41 | NONSYN |
| | rs11715522 | A/C | SEQ ID NO: 42 | flanking_5UTR |
| | rs7636125 | C/G | SEQ ID NO: 43 | 3UTR |
| | rs11710546 | A/G | SEQ ID NO: 44 | 3UTR |
| | rs17038674 | C/T | SEQ ID NO: 45 | 3UTR |
| | rs1050592 | C/T | SEQ ID NO: 46 | 3UTR |
| | rs4986872 | C/T | SEQ ID NO: 47 | SYN |
| | rs17038679 | A/G | SEQ ID NO: 48 | SYN |
| MTHFR | Rs1801133 | C/T | SEQ ID NO: 194 | NONSYN |
| AHR | rs10250822 | C/T | SEQ ID NO: 3 | intron |
| | rs11505406 | C/T | SEQ ID NO: 4 | intron |
| | rs1476080 | A/C | SEQ ID NO: 5 | intron |
| | rs17779352 | C/T | SEQ ID NO: 6 | SYN |
| | rs2066853 | A/G | SEQ ID NO: 7 | NONSYN |
| | rs2074113 | A/C | SEQ ID NO: 8 | intron |
| | rs2158041 | A/G | SEQ ID NO: 9 | intron |
| | rs2282885 | C/T | SEQ ID NO: 10 | intron |
| | rs34938955 | C/T | SEQ ID NO: 11 | 5UTR |
| | rs35225673 | A/C/G/T | SEQ ID NO: 12 | intron |
| | rs4986826 | A/G | SEQ ID NO: 13 | NONSYN |
| | rs713150 | C/G | SEQ ID NO: 14 | intron |
| | rs7796976 | A/G | SEQ ID NO: 15 | 5UTR |
| | rs7811989 | A/G | SEQ ID NO: 16 | intron |
| TNFRSF10A | rs2230229 | A/C/G/T | SEQ ID NO: 29 | NONSYN |
| | rs17088980 | G/T | SEQ ID NO: 30 | NONSYN |
| | rs20576 | A/C | SEQ ID NO: 31 | NONSYN |
| | rs20575 | C/G | SEQ ID NO: 32 | NONSYN |
| | rs11986840 | C/G | SEQ ID NO: 33 | NONSYN |
| | rs20577 | C/T | SEQ ID NO: 34 | NONSYN |
| | rs34737614 | G/T | SEQ ID NO: 35 | NONSYN |
| | rs34127830 | A/C/G/T | SEQ ID NO: 36 | 3UTR |
| | rs2230230 | C/T | SEQ ID NO: 37 | SYN |
| | rs3808537 | C/T | SEQ ID NO: 38 | 5UTR |
| SIGLEC5 | rs3829655 | C/G | SEQ ID NO: 49 | NONSYN |
| | rs8108074 | A/C/G/T | SEQ ID NO: 50 | NONSYN |
| | rs2278831 | A/C/G/T | SEQ ID NO: 51 | NONSYN |
| | rs34553740 | C/T | SEQ ID NO: 52 | NONSYN |
| | rs1973019 | A/G | SEQ ID NO: 53 | NONSYN |
| | rs17740650 | A/C/G/T | SEQ ID NO: 54 | SYN |
| | rs8107754 | A/C/G/T | SEQ ID NO: 55 | SYN |
| CPXCR1 | rs5984611 | A/G | SEQ ID NO: 56 | NONSYN |
| | rs5940915 | A/C | SEQ ID NO: 57 | NONSYN |
| | rs41307393 | C/G | SEQ ID NO: 58 | NONSYN |
| | rs12556970 | C/T | SEQ ID NO: 59 | 3UTR |
| IFNGR1 | rs1327475 | C/T | SEQ ID NO: 65 | intron |
| | rs1887415 | C/T | SEQ ID NO: 66 | NONSYN |
| | rs17175350 | A/C | SEQ ID NO: 67 | NONSYN |
| | rs17175322 | A/G | SEQ ID NO: 68 | NONSYN |
| | rs11575936 | A/G | SEQ ID NO: 69 | NONSYN |
| | rs7769141 | A/C | SEQ ID NO: 70 | 3UTR |
| | rs17181562 | A/G | SEQ ID NO: 71 | 3UTR |
| | rs11914 | G/T | SEQ ID NO: 72 | SYN |
| MTMR15 | rs4779794 | A/G | SEQ ID NO: 73 | NONSYN |
| | rs17846417 | A/G | SEQ ID NO: 74 | NONSYN |
| | rs34722914 | A/G | SEQ ID NO: 75 | 5UTR |
| | rs8023700 | A/G | SEQ ID NO: 76 | 3UTR |
| FAT2 | rs1432862 | C/T | SEQ ID NO: 162 | Missense |
| | rs2053028 | T/C | SEQ ID NO: 216 | Missense |
| | rs6650971 | G/A | SEQ ID NO: 403 | Missense |

[0315] The method is typically performed on the nucleic acid obtained from cells of a biological sample (blood or serum for example) of the subject, for example on the genomic DNA obtained from blood or seric cells, in particular leukocytes, more preferably Peripheral Blood Mononuclear Cells (PBMC), which are non cancerous cells.

[0316] The method may also be performed on tumoral cells of the subject whose normal cells (non cancerous cells) have an altered genotype.

[0317] Inventors herein demonstrate that a “compensatory immunogenic treatment of cancer”, as disclosed in the present description, should be administered, preferably in addition to a conventional treatment of cancer, to such resistant subjects which are not able to induce an anticancer immune response, in order to allow such a response.

[0318] Typically, the alteration in a nucleic acid sequence may be determined at the level of the selected gene (immune gene, specific to the subject, or tumor gene, specific to the tumor), for example AHR DNA, cDNA, RNA or polypeptide. Optionally, the detection is performed by sequencing all or part of the gene locus or by selective hybridization or amplification of all or part of the gene locus. More preferably a gene locus specific amplification is carried out before the alteration identification step. An alteration in the gene locus may be any form of mutation(s), deletion(s), rearrangement(s) and/or insertions in the coding and/or non-coding region of the locus, alone or in various combination(s). Mutations more specifically include point mutations. Deletions may encompass any region of two or more residues in a coding or non-coding portion of the gene locus, such as from two residues up to the entire gene or locus. Typical deletions affect smaller regions, such as domains (introns) or repeated sequences or fragments of less than about 50 consecutive base pairs, although larger deletions may occur as well. Insertions may encompass the addition of one or several residues in a coding or non-coding portion of the gene locus. Insertions may typically comprise an addition of between 1 and 50 base pairs in the gene locus. Rearrangement includes inversion of sequences. The gene locus alteration may result in the creation of stop codons, frameshift mutations, amino acid substitutions, particular RNA splicing or processing, product instability, truncated polypeptide production, etc. The alteration may result in the production of a polypeptide or protein with altered function, stability, targeting or structure. The alteration may also cause a reduction in protein expression or, alternatively, an increase in said production.

[0319] In a preferred embodiment, said alteration is a mutation, an insertion or a deletion of one or more bases. In a particular embodiment of the method according to the present invention, the alteration in the gene locus is selected from a point mutation, a deletion and an insertion in the gene or corresponding expression product, more preferably a point mutation and a deletion. The alteration may be determined at the level of the DNA, RNA or polypeptide.

[0320] Within the context of this invention, the “gene locus”, for example “the AHR gene locus”, designates all sequences or products in a cell or organism including, regarding AHR for example, the AHR coding sequences, AHR non-coding sequences (e.g., introns), AHR regulatory sequences controlling transcription and/or translation (e.g., promoter, enhancer/silencer regions, terminator, 5′UTR, 3′UTR, etc.), all corresponding expression products, such as AHR RNAs (e.g., mRNAs) and AHR polypeptides (e.g., a pre-protein and a mature protein); as well as surrounding sequences of 20 kb region, preferably 15.3 kb region, upstream the starting codon (flanking the 5′UTR region) of the AHR gene and 20 kb region, preferably 14.1 kb region, downstream the untranslated region (flanking the 3′UTR region). In a particular embodiment most alterations are not in the promoter sequence.

[0321] In a particular embodiment of the present invention, the step of determining the ability of the subject to induce an anticancer immune response may consist in determining alteration in a gene locus (in particular an immune gene locus) or in the expression of the protein encoded by said gene, in a biological sample of the patient, the presence of such an alteration being indicative of the inability of the subject to induce an anticancer immune response.

[0322] Alteration of a nucleic acid sequence herein described (in relation with the tumor or with the subject) is preferably a mutation, an insertion or a deletion of one or more bases. More preferably said alteration is one or several single nucleotide polymorphism(s) (SNPs).

[0323] In a particular embodiment, the altered nucleic acid is a wild-type nucleic acid comprising at least one point mutation, preferably a single nucleotide polymorphism (SNP), for example a loss-of-function SNP, i.e., a SNP responsible for the absent or abnormal (non-functional) expression of the protein encoded by the nucleic acid. The wild-type nucleic acid may also comprise several single nucleotide polymorphism(s) (SNPs).

[0324] Once a first SNP has been identified in a genomic region of interest, more particularly in an immune gene locus, other additional SNPs in linkage disequilibrium with this first SNP can be identified. Indeed, any SNP in linkage disequilibrium with a first SNP associated with non-responder phenotype will be associated with this trait. Therefore, once the association has been demonstrated between a given SNP and non-responder phenotype, the discovery of additional SNPs associated with this trait can be of great interest in order to increase the density of SNPs in this particular region. Identification of additional SNPs in linkage disequilibrium with a given SNP involves: (a) amplifying a fragment from the genomic region comprising or surrounding a first SNP from a plurality of individuals; (b) identifying of second SNP in the genomic region harboring or surrounding said first SNP; (c) conducting a linkage disequilibrium analysis between said first SNP and second SNP; and (d) selecting said second SNP as being in linkage disequilibrium with said first marker. Sub-combinations comprising steps (b) and (c) are also contemplated. These SNPs in linkage disequilibrium can also be used in the methods according to the present invention, and more particularly in the methods to predict treatment response or ability to induce an anticancer immune response according to the present invention.

[0325] Mutations in a gene locus which are responsible for non-responder phenotype may be identified by comparing the sequences of the gene locus from patients presenting non-responder phenotype and responder phenotype. Based on the identified association of SNPs of the particular gene, the identified locus can be scanned for mutations. In a preferred embodiment, functional regions such as exons and splice sites, promoters and other regulatory regions of the gene locus are scanned for mutations. Preferably, patients presenting non-responder phenotype carry the mutation shown to be associated with non-responder phenotype and responder phenotype do not carry the mutation or mutated allele associated with reduced cancer treatment response. However, in case of certain SNPs (such as those present in NLRP4), the SNPs protect the host against relapse, i.e, is a protective SNP. The method used to detect such mutations generally comprises the following steps: amplification of a region of the gene locus of interest comprising a SNP or a group of SNPs associated with non responder phenotype from DNA samples of the gene locus from patients presenting non responder phenotype and responder phenotype; sequencing of the amplified region; comparison of DNA sequences of the corresponding genes from patients presenting non responder phenotype and responder phenotype; determination of mutations specific to patients presenting non responder phenotype.

[0326] In the AHR gene, the SNP may be more particularly selected from rs10250822 (SEQ ID NO: 3), rs11505406 (SEQ ID NO: 4), rs1476080 (SEQ ID NO: 5), rs17779352 (SEQ ID NO: 6), rs2066853 (SEQ ID NO: 7), rs2074113 (SEQ ID NO: 8), rs2158041 (SEQ ID NO: 9), rs2282885 (SEQ ID NO: 10), rs34938955 (SEQ ID NO: 11), rs35225673 (SEQ ID NO: 12), rs4986826 (SEQ ID NO: 13), rs713150 (SEQ ID NO: 14), rs7796976 (SEQ ID NO: 15), and rs7811989 (SEQ ID NO: 16).

[0327] A typical SNP in the AHR gene is rs2066853 (SEQ ID NO: 7). Such a SNP AHR A/G (R554K) is indicative of a subject being unable to induce an anticancer immune response. Such a subject is typically non-responder to conventional treatments of cancer.

[0328] In the NLRP4 gene, the SNP is preferably rs302453 (SEQ ID NO: 60). Such a SNP NLRP4 A/T (Gln925Leu) is indicative of a subject being able to induce a better anticancer immune response. Such a subject is typically responder to conventional treatments of cancer

[0329] In the DDX58/RIG-1 gene, the SNP is preferably rs17217280 (SEQ ID NO: 17). Such a SNP DDX58/RIG-1 A/T (Asp508G1u) is indicative of the inability of the subject to respond to conventional treatments of cancer. In other words, the presence of a wild-type allele A in a subject is indicative of being able to induce a better anticancer immune response.

[0330] In the CX3CR1 gene, the SNP is preferably rs3732378 (SEQ ID NO: 39). Such a SNP CX3CR1 A/G (Thr280Met) is indicative of the inability of the subject to respond to conventional treatments of cancer. In other words, the presence of a wild-type allele A in a subject is indicative of being able to induce a better anticancer immune response.

[0331] In the FAT2 gene, the SNPs are preferably rs1432862 (SEQ ID NO: 162), rs2053028 (SEQ ID NO: 216), rs6650971 (SEQ ID NO: 403). Such SNPs FAT2 C/T (Arg574Cys), T/C (Leu3514Ser), G/A (Met3631 Ile) are indicative of a subject being able to induce a better anticancer immune response. Such a subject is typically responder to conventional treatments of cancer. In other words, the presence of a mutated allele in a subject is indicative of being able to induce a better anticancer immune response.

[0332] In the methylene tetrahydrofolate reductase MTHFR gene, the SNP is preferably rs1801133 (SEQ ID NO: 194). Such a SNP MTHFR C/T (A222V) is indicative of a subject being able to induce a better anticancer immune response. Such a subject is typically responder to conventional treatments of cancer. In other words, the presence of a wild-type allele C in a subject is indicative of the inability of the subject to respond to conventional treatments of cancer.

[0333] A particular method herein described comprises, in addition to previously described steps, a step of controlling, in a tumor, blood or serum sample of the subject, the presence of a herein described single nucleotide polymorphism (SNP); the detection of at least one of:

i. an abnormal expression of the proteins encoded by (i) a gene encoding CCR1, (ii) a gene encoding EIF2AK2, and (iii) a gene encoding DNAJC10 or PDIA3, and
ii. an alteration in the gene encoding MTHFR,
being indicative of a resistance of the subject to a therapeutic treatment of cancer.

[0334] Preferably, the alteration is a single nucleotide polymorphism (SNP) corresponding to rs1801133 (wild type allele C/mutated allele T) (SEQ ID NO: 194).

[0335] In the NLRP4 gene, the SNP may be more particularly selected from rs302453 (SEQ ID NO: 60), rs17857373 (SEQ ID NO: 61), rs17857374 (SEQ ID NO: 62), rs34627915 (SEQ ID NO: 63) and rs17854614 (SEQ ID NO: 64).

[0336] In the DDX58 gene, the SNP may be more particularly selected from rs17217280 (SEQ ID NO: 17), rs35253851 (SEQ ID NO: 18), rs951618 (SEQ ID NO: 19), rs35527044 (SEQ ID NO: 20), rs11795404 (SEQ ID NO: 21), rs10813831 (SEQ ID NO: 22), rs11899 (SEQ ID NO: 23), rs10363 (SEQ ID NO: 24), rs10970987 (SEQ ID NO: 25), rs35050877 (SEQ ID NO: 26), rs12236816 (SEQ ID NO: 27), and rs12235719 (SEQ ID NO: 28).

[0337] In the CX3CR1 gene, the SNP may be more particularly selected from rs3732378 (SEQ ID NO: 39), rs3732380 (SEQ ID NO: 40), rs41535248 (SEQ ID NO: 41), rs11715522 (SEQ ID NO: 42), rs7636125 (SEQ ID NO: 43), rs11710546 (SEQ ID NO: 44), rs17038674 (SEQ ID NO: 45), rs1050592 (SEQ ID NO: 46), rs4986872 (SEQ ID NO: 47), and rs17038679 (SEQ ID NO: 48).

[0338] In the TNFRSF10A gene, the SNP may be more particularly selected from rs2230229 (SEQ ID NO: 29), rs17088980 (SEQ ID NO: 30), rs20576 (SEQ ID NO: 31), rs20575 (SEQ ID NO: 32), rs11986840 (SEQ ID NO: 33), rs20577 (SEQ ID NO: 34), rs34737614 (SEQ ID NO: 35), rs34127830 (SEQ ID NO: 36), rs2230230 (SEQ ID NO: 37) and rs3808537 (SEQ ID NO: 38).

[0339] In the SIGLEC5 gene, the SNP may be more particularly selected from rs3829655 (SEQ ID NO: 49), rs8108074 (SEQ ID NO: 50), rs2278831 (SEQ ID NO: 51), rs34553740 (SEQ ID NO: 52), rs1973019 (SEQ ID NO: 53), rs17740650 (SEQ ID NO: 54), and rs8107754 (SEQ ID NO: 55).

[0340] In the CPXCR1 gene, the SNP may be more particularly selected from rs5984611 (SEQ ID NO: 56), rs5940915 (SEQ ID NO: 57), rs41307393 (SEQ ID NO: 58), and rs12556970 (SEQ ID NO: 59).

[0341] In the IFNGR1 gene, the SNP may be more particularly selected from rs1327475 (SEQ ID NO: 65), rs1887415 (SEQ ID NO: 66), rs17175350 (SEQ ID NO: 67), rs17175322 (SEQ ID NO: 68), rs11575936 (SEQ ID NO: 69), rs7769141 (SEQ ID NO: 70), rs17181562 (SEQ ID NO: 71), and rs11914 (SEQ ID NO: 72).

[0342] In the MTMR15 gene, the SNP may be more particularly selected from rs4779794 (SEQ ID NO: 73), rs17846417 (SEQ ID NO: 74), rs34722914 (SEQ ID NO: 75), and rs8023700 (SEQ ID NO: 76).

[0343] In the FAT2 gene, the SNP may be more particularly selected from rs1432862 (SEQ ID NO: 162), rs 2053028 (SEQ ID NO: 216), and rs6650971 (SEQ ID NO: 403).

[0344] The presence of an alteration in a nucleic acid may be easily detected by the man skilled in the art using methods of the art such as restriction digestion, sequencing, selective hybridisation (for example with a nucleic acid probe present on a nucleotide array), and/or selective amplification, as further explained below.

[0345] Alterations in a gene may also be detected by determining the presence of an altered RNA expression. Altered RNA expression includes the presence of an altered RNA sequence, the presence of an altered RNA splicing or processing, the presence of an altered quantity of RNA, etc. These may be detected by various techniques known in the art, including by sequencing all or part of the RNA or by selective hybridisation or selective amplification of all or part of said RNA, for instance.

[0346] The presence of an abnormal expression of a target nucleic acid (which may be a nucleic acid from the subject or from the tumor), such as one of those identified previously, may be detected in particular by real time quantitative reverse transcription PCR (qRT-PCR) using probes designed to hybridize within the target nucleic acid sequence (see O'Driscoll L. et al., 1993 and Yajima T. et al, 1998).

[0347] In a further variant, the method comprises detecting the presence of an altered expression of the polypeptide or protein encoded by the gene of interest. Altered polypeptide expression includes the presence of an altered polypeptide sequence, the presence of an altered quantity of polypeptide, the presence of an altered tissue distribution, etc. These may be detected by various techniques known in the art, including by sequencing and/or binding to specific ligands (such as antibodies), for instance.

[0348] In a particular embodiment, the detection of an abnormal protein expression may be easily performed, by the man skilled in the art, by measuring the cellular level of mRNA encoding a normal protein, a decreased level compared to a control or standard level being correlated to an abnormal protein expression.

[0349] Sequencing can be carried out using techniques well known in the art, using automatic sequencers. The sequencing may be performed on the complete gene locus or, more preferably, on specific domains thereof, typically those known or suspected to carry deleterious mutations or other alterations.

[0350] Amplification is based on the formation of specific hybrids between complementary nucleic acid sequences that serve to initiate nucleic acid reproduction. Amplification may be performed according to various techniques known in the art, such as by polymerase chain reaction (PCR), ligase chain reaction (LCR), strand displacement amplification (SDA) and nucleic acid sequence based amplification (NASBA). These techniques can be performed using commercially available reagents and protocols. Preferred techniques use allele-specific PCR or PCR-SSCP. Amplification usually requires the use of specific nucleic acid primers, to initiate the reaction. Nucleic acid primers useful for amplifying sequences from the gene locus of interest are able to specifically hybridize with a portion of the gene locus that flank a target region of said locus, said target region being altered, for example in the case of the immune genes, in non responder patients.

[0351] Another particular object of this invention resides in a nucleic acid primer useful for amplifying sequences from the gene or locus of interest including surrounding regions. Such primers are preferably complementary to, and hybridize specifically to nucleic acid sequences in the gene locus. Particular primers are able to specifically hybridize with a portion of the gene locus that flank a target region of said locus, said target region being altered, for example in the case of the immune genes, in non responders. Primers that can be used to amplify target region comprising SNPs may be designed based on their sequence or on the genomic sequence of a particular gene.

[0352] The invention also relates to a nucleic acid primer, said primer being complementary to and hybridizing specifically to a portion of a gene locus coding sequence (e.g., gene or RNA) altered in certain non responders subjects. In this regard, particular primers of this invention are specific for altered sequences in a gene locus or RNA. By using such primers, the detection of an amplification product indicates the presence of an alteration in the gene locus. In contrast, the absence of amplification product indicates that the specific alteration is not present in the considered sample. The invention also concerns the use of a nucleic acid primer or a pair of nucleic acid primers as mentioned above in a method of determining the treatment response of a subject having a tumor or in a method of assessing the response of a subject to a treatment of cancer.

[0353] Hybridization detection methods are based on the formation of specific hybrids between complementary nucleic acid sequences that serve to detect nucleic acid sequence alteration(s). A particular detection technique involves the use of a nucleic acid probe specific for wild-type or altered (immune or tumor) gene or corresponding RNA, followed by the detection of the presence of a hybrid. The probe may be in suspension or immobilized on a substrate or support (as in nucleic acid array or chips technologies). The probe is typically labeled to facilitate detection of hybrids.

[0354] In this regard, a particular embodiment of this invention comprises contacting the sample from the subject with a nucleic acid probe specific for an altered immune gene locus, and assessing the formation of an hybrid.

[0355] In a particularly preferred embodiment, the method comprises contacting simultaneously the sample with a set of probes that are specific, respectively, for wild type gene locus and for various altered forms thereof. In this embodiment, it is possible to detect directly the presence of various forms of alterations in the gene locus in the sample. Also, various samples from various subjects may be treated in parallel.

[0356] Within the context of this invention, a probe refers to a polynucleotide sequence which is complementary to and capable of specific hybridization with a (target portion of) gene or RNA, and which is suitable for detecting polynucleotide polymorphisms associated with the gene alleles which predispose to or are associated with a reduced ability of the subject or of the tumor to induce an anticancer immune response (“mutated allele”).

[0357] Probes are preferably perfectly complementary to the particular gene, RNA, or target portion thereof. Probes typically comprise single-stranded nucleic acids of between 8 to 1000 nucleotides in length, for instance of between 10 and 800, more preferably of between 15 and 700, typically of between 20 and 500. It should be understood that longer probes may be used as well. A preferred probe of this invention is a single stranded nucleic acid molecule of between 8 to 500 nucleotides in length, which can specifically hybridize to a region of a gene locus or RNA that carries an alteration.

[0358] The method of the invention employs a nucleic acid probe specific for an altered (e.g., a mutated) gene or RNA, i.e., a nucleic acid probe that specifically hybridizes to said altered gene or RNA and essentially does not hybridize to a gene or RNA lacking said alteration.

[0359] Specificity indicates that hybridization to the target sequence generates a specific signal which can be distinguished from the signal generated through non-specific hybridization. Perfectly complementary sequences are preferred to design probes according to this invention. It should be understood, however, that certain mismatch may be tolerated, as long as the specific signal may be distinguished from non-specific hybridization.

[0360] The invention also concerns the use of a nucleic acid probe as described above in a method of determining cancer treatment response of a subject or in a method of assessing the response of a subject to a cancer treatment.

[0361] As indicated above, alteration in the (immune or tumor) gene locus may also be detected by screening for alteration(s) in polypeptide sequence or expression levels.

[0362] In order to detect a protein on the cell surface, or, in order to detect the presence, in a cell, of a protein, immunohistochemistry (for example in a tumor bed), ELISA (for example in a blood or serum sample), immunoblotting (in particular Western blot), proteomics, or antibody-based biosensors directed against the protein of interest, as well as any other method known from the man of the art, can be applied to a tumour specimen as previously defined (see Obeid et al., 2007 which provide examples of such techniques).

[0363] Immunofluorescence staining or FACS (Fluorescent Activated Cell Sorting) analyses (flow cytometry analyses) is an example of an appropriate method to detect the translocation of a particular protein from the inside to the surface of a cell, in particular of a tumour cell that has been previously submitted to a treatment of cancer.

[0364] Contacting the sample with a ligand specific for a polypeptide encoded by a particular gene and determining the formation of a complex is also described.

[0365] Different types of ligands may be used, such as specific antibodies. In a specific embodiment, the sample is contacted with an antibody specific for a polypeptide encoded by a particular gene and the formation of a complex is determined. Various methods for detecting such a complex can be used, such as ELISA, radio-immunoassays (RIA) and immuno-enzymatic assays (IEMA).

[0366] Within the context of this invention, an antibody designates a polyclonal antibody, a monoclonal antibody, as well as fragments or derivatives thereof having substantially the same antigen specificity. Fragments include Fab, Fab′ 2, CDR regions, etc. Derivatives include single-chain antibodies, humanized antibodies, poly-functional antibodies, etc. An antibody specific for a polypeptide encoded by a particular gene designates an antibody that selectively binds said polypeptide, i.e., an antibody raised against said polypeptide or an epitope-containing fragment thereof. Although non-specific binding towards other antigens may occur, binding to the target polypeptide occurs with a higher affinity and can be reliably discriminated from non-specific binding.

[0367] Immunoblotting can in particular be used to measure the degradation of BAP31, the phosphorylation of elF2alpha, the presence of a protein selected for example from GCN2 and HRI or the activation of a protein selected for example from caspase 8, reticulon-3, PERK, PKR, Bax and Bak in a cell, in particular a tumor cell, more particularly in a tumor cell which has been previously exposed to a cancer treatment, in particular to a conventional cancer treatment.

[0368] It is also disclosed kits to predict treatment response or to predict ability to induce an anticancer immune response comprising products and reagents for detecting in a sample from a subject the presence of an alteration in a gene locus or in the corresponding polypeptide or protein; in the gene or corresponding polypeptide or protein expression; and/or in the gene activity.

[0369] Such kits comprise any primer, any pair of primers, any nucleic acid probes (wild-type and mutant) and/or any ligand, preferably antibody, described in the present invention. Such kits can further comprise reagents and/or protocols for performing a hybridization, amplification or antigen-antibody immune reaction.

[0370] Particular kits are the following kits:
[0371] A kit to detect the abnormal expression of a gene selected from CCR1, EIF2Ak2, DNAJC10, PDIA3, EIF2A, PPP1CB, IKBKB, PPP1CC, BAX and combinations thereof, in a tumor sample of the subject, the kit comprising (i) at least one pair of primers, in particular two, three, four, five, six, seven, eight, nine pairs of primers corresponding to the previously mentioned genes, and (ii) at least one probe, preferably a fluorescent probe, allowing the quantitative detection of the expression of a gene selected from CCR1, EIF2Ak2, DNAJC10, PDIA3, EIF2A, PPP1CB, IKBKB, PPP1CC, BAX, preferably at least one fluorescent probe for each of the selected genes of the previously mentioned list of genes, and (iii) a leaflet providing the control quantitative expression values corresponding to at least one of said genes in a control population.
[0372] A kit to detect an abnormal expression of a gene selected from AHR and MTHFR (in particular the presence of a polymorphism associated with an abnormal expression of such a gene), in a tumor or blood sample of the subject, the kit comprising (i) at least one pair of primers, preferably two pairs of primers corresponding respectively to the AHR and to the MTHFR gene, and (ii) at least two differently labelled probes, preferably two differently labelled fluorescent probes, the first probe recognizing the wild-type allele and the second probe recognizing the mutated allele of a gene selected from AHR and MTHFR, preferably two differently labelled probes for each of said genes.
[0373] A kit to detect the presence of a polymorphism associated with an abnormal expression of a gene selected from FAT2 and MTHFR (for example a kit to detect the presence of a polymorphism associated with an abnormal expression of such a gene), in a tumor or blood sample of the subject, the kit comprising (i) at least one pair of primers, and (ii) at least two differently labelled probes, the first probe recognizing the wild-type allele and the second probe recognizing the mutated allele of a gene selected from FAT2 and MTHFR.
[0374] A kit to detect the presence of a polymorphism associated with an abnormal expression of a gene selected from DDX58 (RIG-1) and CX3CR1 (for example a kit to detect the presence of a polymorphism associated with an abnormal expression of such a gene), in a tumor or blood sample of the subject, the kit comprising (i) at least one pair of primers, and (ii) at least two differently labelled probes, the first probe recognizing the wild-type allele and the second probe recognizing the mutated allele of a gene selected from DDX58 and CX3CR1.
[0375] A kit to detect the presence of a polymorphism associated with an abnormal expression of a NLRP4 gene (for example a kit to detect the presence of a polymorphism associated with an abnormal expression of such a gene), in a tumor or blood sample of the subject, the kit comprising (i) at least one pair of primers, and (ii) at least two differently labelled probes, the first probe recognizing the wild-type allele and the second probe recognizing the mutated allele of the NLRP4 gene.
[0376] A kit comprising:
   [0377] a) (i) at least one pair of primers, (ii) at least two distinct probes, preferably different fluorescent probes, allowing the quantitative detection of the expression of a gene selected from CCR1, EIF2Ak2, DNAJC10, PDIA3, EIF2A, PPP1CB, IKBKB, PPP1CC and BAX and (iii) a leaflet providing the control quantitative expression values corresponding to at least one of said genes in a control population; and
   [0378] b) (i) at least one pair of primers, and (ii) at least two differently labelled probes, the first probe recognizing the wild-type allele and the second probe recognizing the mutated allele of a gene selected from NLRP4, FAT2 and MTHFR (for neoadjuvant therapy) or TLR4, P2RX7, DDX58 (for adjuvant therapy).
[0379] A kit comprising:
   [0380] a) several antibodies for immunohistochemistry usage recognizing the core protein machinery of ER stress and autophagy in tissue sections (paraffin embedded- or frozen) suh as phosphorylated eif2a, ERp57, calreticulin, HMGB1, LC3 gate 16 GABARAP (gamma-aminobutyric acid receptor-associated protein); and
   [0381] b) at least one pair of primers, and (ii) at least two differently labelled probes, the first probe recognizing the wild-type allele and the second probe recognizing the mutated allele of a gene selected from NLRP4, FAT2 and MTHFR (for neoadjuvant therapy) or TLR4, P2RX7, DDX58 (for adjuvant therapy).

[0382] The herein described kits may further comprise a micro-array or a 96-wells or 384-wells plate to be used for the herein described methods and read through quantitative PCR or multiplex technology.

### Compensatory Immunogenic Treatment of Cancer

[0383] Inventors advantageously herein provide a new strategy for treating cancer which consists in administering to the subject in need thereof an additional treatment herein identified as “compensatory immunogenic treatment of cancer”. As explained previously, a typical subject is a subject resistant to a treatment of cancer, in particular to a conventional treatment of cancer.

[0384] This compensatory immunogenic treatment of cancer will allow a reaction from the immune system of the subject having a tumor directed against the tumour cells, or will stimulate such a reaction.

[0385] Inventors have in particular discovered that such a compensatory immunogenic treatment of cancer is able to allow or improve the efficiency of a conventional therapy as described above, in a subject in need thereof.

[0386] The compensatory immunogenic treatment of cancer according to the present invention typically involves the exogenous supply, administration for example, to the subject, of at least one compensatory product (molecule, compound, drug or therapeutic agent, cell), preferably together with a conventional therapeutic agent used in a treatment as described above (in order to obtain a therapeutic effect, preferably a synergistic effect), said conventional treatment being easily selected by the cancerologist, as exemplified previously, according to the nature of the cancer to be prevented or treated.

[0387] The function of a compensatory product, in the context of the present invention, is to allow the immune system to generate a cancer immune response in a subject identified, with a method herein described, as resistant to a treatment of cancer. As largely explained previously, such a resistance may be due to the inability of the treatment of cancer the subject has been exposed to, to the inability of the subject and/or to the inability of the tumor, to induce an anticancer immune response.

[0388] The compensatory product may be selected from a protein, as previously herein identified, i) allowing or enhancing CRT, ERp57, LysRS (KARS) and/or KDEL receptor exposure at the surface of tumor cells, ii) allowing or enhancing the secretion of ATP, HMGB1 (High-mobility group box 1), LysRS and/or IL-8, iii) stimulating the autophagy machinery, and/or an ER stress response, iv) recruiting and/or activating specific effectors in tumor beds, such as IL-17 producing γδ T lymphocytes, cytotoxic T cells and dendritic cells, v) promoting activation of the TLR4/myd88 pathway, vi) triggering the NALP3 (Nacht Domain-, Leucine-Rich Repeat-, and PYD-Containing Protein 3) inflammasome.

[0389] The compensatory product may also be selected from (i) a product allowing or enhancing the secretion of ATP, HMGB1, LysRS and/or IL-8, and/or the exposure of CRT, ERp57, LysRS and/or KDEL receptor at the surface of a tumour cell, (ii) a product stimulating the autophagy machinery and/or an ER stress response, (iii) a product recruiting and/or activating IL-17 producing γδ T lymphocytes, cytotoxic T cells and/or dendritic cells, (iv) a product promoting activation of the TLR4/myd88 pathway, or able to bypass said pathway, (v) a product triggering the P2RX7 (P2X purinoreceptor 7) and/or the NALP3 inflammasome, (vi) a product allowing or enhancing the secretion of IL-1b, (vii) a product capable of stimulating intratumoral Vd2 T lymphocytes, and (viii) a product selected from an anti-allergic drug, a neurotropic drug, an antihypertensive or cardiotropic drug such as a Na⁺K⁺ATPase inhibitor, in particular a cardiac glycoside, a spindle poison drug, an antimicrobial drug, an anti-osteoclastic drug, a diuretic drug, an oestrogen, an apyrase inhibitor, and (ix) any combination thereof.

[0390] In the present invention, the term “endogenous” means that a particular protein (for example IL-1b) is produced by the cell as a wild-type protein. The wild-type protein has to be distinguished from the recombinant protein (for example rIL-1b), the recombinant protein whose activity, in particular regarding the immune system, is respectively substantially identical to that of the previously mentioned wild-type protein, but which need a human intervention to be produced by the cell.

[0391] In the present invention, the term “homologous variant” is used to designate any protein that comprises deleted or substituted amino acid(s), for example any wild-type or recombinant protein or protein fragment that exhibits the properties of the corresponding wild-type protein, in particular that is able to induce a response from the immune system, for example an immunogenic tumor cell death or apoptosis as previously defined.

[0392] A preferred “compensatory product” usable in the present invention that allows or enhances the secretion of ATP, HMGB1, LysRS and/or IL-8, and/or the exposure of CRT, ERp57, LysRS and/or KDEL receptor at the surface of a tumour cell, in particular of a dying tumor cell, can be selected from rCRT, rIL-8, inhibitors of PP1/GADD34, chloroquine, TLR7 agonists, antihistaminic drugs such as brompheniramine maleate, bumetanide, cyproheptadine, fenspiride, flunisolide, ketotifene, loratadine and/or cardiotrop drugs such as amlodipine besylate, atenolol, benazepril hydrochloride, nimodipine and/or antimicrobial such as cycloserine, diloxanide furoate, fluconazole, mebendazole, mefloquine and/or neurotrop drugs such as aripiprazole, bromocriptine mesylate, carbamazepine, clozapine, haloperidol, methysergide maleate, mianserin hydrochloride, mirtazapine, olanzapine, paroxetine hydrochloride, perphenazine, pizotyline malate, procyclidine hydrochloride, quetiapine fumarate, rapamycin, risperidone, sertraline hydrochloride, trazodone, ziprasidone and/or spindle poison drugs such as colchicine, doxorubicin, mitoxanthrone hydrochloride, vinblastine sulfate, vincristine sulphate and/or anti-osteoclast drugs such as etidronate disodium, estrogen such as estrone, and/or a Na⁺K⁺ATPase inhibitor, in particular a cardiac glycoside such as digoxin, digitoxin, ouabain, proscillaridin, strophantin, sanguinarin, and/or an apyrase inhibitor, and homologous variant thereof.

[0393] A preferred “compensatory product” usable in the present invention for stimulating the autophagy machinery may be selected from an apyrase inhibitor such as ecto-nucleoside-triphosphate-diphosphohydrolase (CD39) inhibitor (polyoxometalate 1), 6-N,N-Diethyl-D-beta-gamma-dibromomethylene adenosine triphosphate (ARL 67156), 2′(3′)-O-(4-benzoylbenzoyl)-adenosine triphosphate, an antibody inhibiting the ecto-apyrase activity of CD39 and an antibody inhibiting the ecto-5′-nucleotidase activity; spermidin; resveratrol; rapamycin analogs; and/or an ER stress response may be selected from recombinant calreticulin, digoxin, digitoxin, ouabain, strophantin, proscillaridin, sanguinarine, and from an ER stress response inducer, such as thapsigargin (THAPS).

[0394] A preferred “compensatory product” usable in the present invention for recruiting and/or activating specific effectors in tumor beds, such as IL-17 producing γδ T lymphocytes, cytotoxic T cells and dendritic cells, may be selected from rIL-1b, rIL-17, rIL-22, a phosphoantigen, a Vδ2 T lymphocytes activator, a leukotrien, a prostaglandin, and a chemokine.

[0395] A preferred “compensatory product” usable in the present invention for promoting activation of the TLR4/myd88 pathway, or able to bypass said pathway, may be selected from dendrophilin, a TLR3 ligand such as such as Poly I:C, poly A:U; a TLR9 ligand such as CpG ODN (CpG oligodeoxynucleotides); HMGB1; and chloroquine.

[0396] Typically a product capable of promoting activation of the TLR4/myd88 pathway is selected from dendrophilin and any TLR4/myd88 agonists.

[0397] A preferred “compensatory product” usable in the present invention for triggering the P2RX7 (P2X purinoceptor 7) and/or the NALP3 inflammasome, may be selected from a TLR7 agonist such as synthetic oligoribonucleotides containing arabinonucleotides, imiquimod and resiquimod; a TLR8 agonist such as polyG10; a recombinant cytokine such as rIL-1b and IL-12; and an inhibitor of apyrases such as ecto-nucleoside-triphosphate-diphosphohydrolase (CD39) inhibitor (polyoxometalate 1), 6-N,N-Diethyl-D-beta-gamma-dibromomethylene adenosine triphosphate (ARL 67156), 2′(3′)-O-(4-benzoylbenzoyl)-adenosine triphosphate, an antibody inhibiting the ecto-apyrase activity of CD39 and an antibody inhibiting the ecto-5′-nucleotidase activity.

[0398] A preferred “compensatory product” usable in the present invention that allows or enhances the secretion of IL-1b, in particular by an immune cell (as herein defined), can be selected from recombinant IL-12 (rIL-12) and/or recombinant IL-1b (rIL-1b). Such a recombinant cytokine may advantageously be used in combination with a molecule selected from an anti-PD1 (Programmed Death 1) molecule, a B7-DCFc molecule, an antibody directed against CTLA4 (anti-Cytotoxic T-Lymphocyte Antigen 4 Ab) or against 4-1BBL (anti-4-1BBL Ab), a metronomic cyclophosphamide and any combination thereof.

[0399] The compensatory molecule may also be a molecule capable of stimulating intratumoral Vd2 T lymphocytes such as a molecule selected from a phosphoantigen (such as bromohydrinpyrophosphate or BrHPP, phosphostim®) and a lipid. Such a compensatory molecule is preferably used in combination with a conventional chemotherapeutic agent in particular in patients who do not correctly express IL-17.

[0400] The compensatory molecule may also be a molecule capable of promoting activation of costimulatory receptors (such as agonists CD40 Ab, CD27 Ab, 4-1BB Ab) or a molecule (for example an antibody) capable of blocking inhibitory pathways such as CTLA4, LAG3, Tim-3, PD-1, PDL1, BTLA4.

[0401] The compensatory molecule may more particularly be selected from an anti-allergic drug, in particular an anti-histaminic drug or an anti-inflammatory drug; a neurotropic drug, in particular an antidepressant drug, an antipsychotic drug, an antiparkinsonian drug, an anti-headache drug, an analgesic drug, an anticonvulsant drug and an immunosuppressive drug; an antihypertensive or cardiotropic drug such as a Na⁺K⁺ATPase inhibitor; a spindle poison drug such as an antineoplastic drug, an antimitotic drug and an antigout drug; an antimicrobial drug, in particular an anthelmintic drug, an amebicide drug, an antibacterial drug, an antifungal drug and an antimalarial drug; an anti-osteoclastic drug; a diuretic drug; an oestrogen; an apyrase inhibitor; and any combination thereof.

[0402] In particular embodiments of the present invention:
[0403] the anti-histaminic drug may be selected from antazoline phosphate, azelastine hydrochloride, brompheniramine maleate, cyclizine, cyproheptadine, ketotifene, fenspiride, loratadine and terfenadine.
[0404] the anti-inflammatory drug may be flunisolide.
[0405] the antidepressant drug may be selected from sertraline hydrochloride, paroxetine hydrochloride, mianserin hydrochloride, trazodone and mirtazapine.
[0406] the antipsychotic drug may be selected from ketanserin tartrate, risperidone, olanzapine, quetiapine fumarate, ziprasidone, clozapine, aripiprazole, haloperidol and perphenazine.
[0407] the antigout drug may be colchicine.
[0408] the antiparkinsonian drug may be selected from procyclidine hydrochloride and bromocriptine mesylate.
[0409] the anti-headache drug may be selected from methylsergide maleate and pizotyline malate.
[0410] the analgesic drug may be carbamazepine.
[0411] the anticonvulsant drug may be carbamazepine.
[0412] the immunosuppressive drug may be rapamycin.
[0413] the antihypertensive or cardiotropic drug may be selected from atenolol, benazepril hydrochloride, amlodipine besylate and nimodipine.
[0414] the antineoplastic drug may be selected from MTX, DX, vinblastine sulphate and vincristine sulphate.
[0415] the antimitotic drug may be colchicine.
[0416] the amebicide drug may be diloxanide furoate.
[0417] the anthelmintic drug may be mebendazole.
[0418] the antibacterial drug may be selected from cycloserine
[0419] the antifungal drug may be fluconazole.
[0420] the antimalarial drug may be mefloquine.
[0421] the anti-osteoclastic drug may be etidronate disodium.
[0422] the diuretic drug may be bumetanide.
[0423] the oestrogen may be estrone.
[0424] the Na⁺K⁺ATPase inhibitor may be a cardiac glycoside such as digoxin, digitoxin, ouabain, proscillaridin, strophantin and sanguinarin.
[0425] the apyrase inhibitor may be a ecto-nucleoside-triphosphate-diphosphohydrolase (CD39) inhibitor (polyoxometalate 1), 6-N,N-Diethyl-D-beta-gamma-dibromomethylene adenosine triphosphate (ARL 67156), 2′(3′)-O-(4-benzoylbenzoyl)-adenosine triphosphate, an antibody inhibiting the ecto-apyrase activity of CD39 and an antibody inhibiting the ecto-5′-nucleotidase activity.

[0426] The compensatory molecule may further be selected from an histamine H1 antagonist such as antazoline phosphate, azelastine hydrochloride, brompheniramine maleate, cyclizine, cyproheptadine, ketotifene, fenspiride, loratadine or terfenadine; a 5HT uptake inhibitor such as sertraline hydrochloride or paroxetine hydrochloride; a Ca channel blocker such as amlodipine besylate or nimodipine; a spindle poison such as colchicine, vinblastine sulphate or vincristine sulfate; a topoisomerase II inhibitor such as MTX or DX; a dopamine antagonist such as haloperidol; a dopamine and serotonin antagonist such as risperidone, olanzapine, or clozapine; a glucose uptake inhibitor such as mebendazole; an inhibitor of alanine racemase such as cycloserine; a norepinephrine reuptake inhibitor such as mianserin hydrochloride; an alpha2-adrenergic receptor antagonist such as mirtazapine; a ergosterol synthesis inhibitor such as fluconazole; a 5HT antagonist such as ketanserin tartrate, pizotyline lalate; a beta adrenergic blocker such as atenolol; a ACE inhibitor such as benazepril hydrochloride; a bone resorption inhibitor such as etidronate disodium; an anticholinergic such as benserazide hydrochloride, biperiden, carbidopa, cyclopentolate hydrochloride, dibucaine hydrochloride, dicyclomine hydrochloride, doxepin hydrochloride, ethopropazine hydrochloride, maprotiline hydrochloride, mepenzolate bromide, nortriptyline, protryptiline hydrochloride, oxybutynin chloride, procyclidine hydrochloride, pyrimethamine, quinidine gluconate, solifenacin, trimipramine maleate; a prolactine inhibitor such as bromocriptine mesylate; a FRAP inhibitor such as rapamycin, a steroid such as flunisolide; an adrenergic agonist such as adrenaline bitartrate, xylometazoline hydrochloride, naphazoline hydrochloride; and any combination thereof.

[0427] The compensatory molecule may further be selected from an acetamide, an alkaloid derived from periwinkle, an alkaloid derived from ergot, an anthracycline, a benzimidazole, a benzodiazepine, a butyrophenone, a dibenzoazepine, a dibenzocycloheptene, a dibenzodiazepine, a dihydropyridine, a diphosphonate, a phenylpiperidine, a propanol and a thiazole derivative.

[0428] A particular acetamide may be selected from for example acetaminosalol, acetanilide, aminitrozol, bufexamac, citiolone, clofexamide chlorhydrate, clofezone, fenoxedil chlorhydrate, guanfacine chlorhydrate, lidocaine, lidocaine chlorhydrate, mefexamide chlorhydrate, oxetacaine, salicylate de picolamine, thiamphenicol, thiamphenicol aminoacetate acetylcysteinate, thiamphenicol aminoacetate chlorhydrate and valpromide.

[0429] A particular alkaloid derived from periwinkle may be selected from for example vindesine sulphate and vinorelbine ditartrate.

[0430] A particular alkaloid derived from ergot may be selected from for example lisuride maleate acide, methylergometrine maleate, methysergide maleate acide and nicergoline.

[0431] A particular anthracycline may be selected from for example aclarubicine chlorhydrate, daunorubicine chlorhydrate, epirubicine chlorhydrate, idarubicine chlorhydrate, pirarubicine and zorubicine chlorhydrate.

[0432] A particular benzimidazole may be selected from for example albendazole, astemizole, bendazol, benperidol, candesartan cilexetil, chlormidazole chlorhydrate, clemizole hexachlorophenate, clemizole penicilline, clemizole undecylenate, domperidone, flubendazole, lansoprazole, mibefradil dichlorhydrate, mizolastine, omeprazole, oxatomide, pantoprazole sodique, pimozide, rabeprazole sodique, telmisartan and tiabendazol.

[0433] A particular benzodiazepine may be selected from for example alprazolam, bromazepam, brotizolam, chlordiazepoxide, clobazam, clonazepam, clorazepate dipotassique, clotiazepam, cloxazolam, delorazepam, diazepam, estazolam, flunitrazepam, ketazolam, loflazepate d′ ethyle, loprazolam mesilate, lorazepam, lormetazepam, medazepam, midazolam chlorhydrate, nitrazepam, nordazepam, oxazepam, pirenzepine dichlorhydrate, prazepam, temazepam, tetrazepam, tofisopam and triazolam.

[0434] A particular butyrophenone may be selected from for example benperidol, buflomedil chlorhydrate, droperidol, fluanisone, haloperidol decanoate, moperone chlorhydrate, pipamperone dichlorhydrate, primaperone chlorhydrate and trifluperidol chlorhydrate

[0435] A particular dibenzoazepine may be selected from for example carpipramine dichlorhydrate, clomipramine chlorhydrate, desipramine chlorhydrate, imipramine chlorhydrate, metapramine fumarate, opipramol dichlorhydrate, prozapine chlorhydrate, quinupramine, trimipramine maleate and trimipramine mesilate.

[0436] A particular dibenzocycloheptene may be selected from for example amineptine chlorhydrate, amitriptyline, amitriptyline chlorhydrate, cyproheptadine chlorhydrate, demexiptiline chlorhydrate, nortriptyline chlorhydrate, noxiptiline chlorhydrate and protriptyline chlorhydrate.

[0437] A particular dibenzodiazepine may be selected from for example clozapine and dibenzepine chlorhydrate.

[0438] A particular dihydropyridine may be selected from for example felodipine, isradipine, lacidipine, nicardipine chlorhydrate, nifedipine and nitrendipine.

[0439] A particular diphosphonate may be selected from for example alendronate monosodique, clodronate disodique, ibandronate sodique, pamidronate disodique and tiludronate disodique.

[0440] A particular phenylpiperidine may be selected from for example remifentanil chlorhydrate and sufentanil.

[0441] A particular propanol may be selected from for example acranil, alprenolol chlorhydrate, bufeniode, buphenine chlorhydrate, bupranolol chlorhydrate, chlorobutanol, cimepanol, clofedanol, corbadrine chlorhydrate, cyclopentobarbital ephedrine, dimercaprol, dioxethedrine chlorhydrate, dioxyphedrine chlorhydrate, diphepanol, ephedrine, ephedrine chlorhydrate, ephedrine levulinate, ephedrine sulfate, fenalcomine chlorhydrate, ifenprodil tartrate, inosiplex, isoxsuprine chlorhydrate, metaraminol bitartrate, methoxamine chlorhydrate, metoprolol succinate, metoprolol tartrate, nadolol, ornidazole, oxprenolol chlorhydrate, penbutolol sulfate, phenylpropanolamine chlorhydrate, pindolol, pridinol chlorhydrate, pseudoephedrine chlorhydrate, pseudoephedrine sulfate, racephedrine chlorhydrate, ritodrine chlorhydrate, secnidazole, suloctidil, tertatolol chlorhydrate, trihexyphenidyle chlorhydrate, zipeprol and zipeprol dichlorhydrate

[0442] A particular thiazole derivative may be selected from for example azathioprine, bifonazole, butoconazole nitrate, carbimazole, clotrimazole, dacarbazine, econazole nitrate, eprosartan mesilate, etomidate chlorhydrate, fenticonazole nitrate, histamine dichlorhydrate, imiquimod, isoconazole nitrate, ketoconazole, metronidazole, metronidazole benzoate, miconazole, miconazole nitrate, nimorazole, ondansetron chlorhydrate, ornidazole, oxiconazole nitrate, secnidazole, sertaconazole nitrate, sulconazole nitrate, thiamazole, tinidazole and tioconazole.

[0443] A further object of the present invention relates to the use of at least one compensatory molecule, from the molecules identified previously, to prepare a pharmaceutical composition that is preferably intended to be administered in combination with a distinct product. typically an agent used in a treatment of cancer, in particular in a conventional treatment of cancer as mentioned previously (for example a non immunogenic treatment), to prevent or treat a cancer as defined above, in a mammal, preferably a human.

[0444] In this context, the compensatory molecule can be considered as an adjuvant to the conventional therapeutic drug.

[0445] In a particular embodiment, if the patient having a tumor is to be exposed to an immunogenic conventional cancer treatment as previously defined, and if the tumor is identified, using a method as herein described, as not able to induce an anticancer immune response, then a compensatory product should be administered to the subject, preferably together with the first exposition, for example administration, of the immunogenic conventional cancer treatment (for example chemotherapeutic drug, ionizing radiation, etc.).

[0446] Such a compensatory product may be selected in particular from a recombinant CRT (rCRT) and a recombinant IL-8 (rIL-8).

[0447] In such a situation where the tumor is not able to induce an anticancer immune response, the compensatory product is preferably to be administered in the tumor or in the tumor bed.

[0448] In another particular embodiment, (i) if the patient having a tumor is to be exposed to an immunogenic conventional cancer treatment as previously defined, for example a chemotherapy using anthracyclines, (ii) if the tumor, for example a breast tumor, is identified, using a method as herein described, as able to induce an anticancer immune response, and (iii) if the subject is identified, using a method as herein described, as not able to induce an anticancer immune response, because, for example, of the presence of a SNP [as identified previously, in particular rs2066853 (SEQ ID NO: 7)] in her AHR gene, then a compensatory product should be administered to the subject, preferably with a conventional treatment of cancer.

[0449] In a preferred embodiment, the conventional treatment of cancer is a chemotherapy and the compensatory product is administered after each cycle of the all chemotherapeutic treatment, preferably two, three, four or five days after the exposition of the subject to a cycle of the chemotherapeutic treatment.

[0450] Such a compensatory product may be selected for example from IL-17 producing γδ T cells, phosphantigens such as biphosphonates (zoledronate) and clodronate.

[0451] In a particular embodiment of the present invention, the absence of IL-17 producing γδ T lymphocytes in the tumor of a subject or the presence of SNP in the genomic DNA of the subject (such as in the AHR or in the NLRP4 gene) for example, is indicative of the absence of an anticancer immune response in the subject who has been exposed to a conventional treatment of cancer, in particular to a chemotherapeutic treatment of cancer, and reveals a resistance of the subject to the treatment of cancer.

[0452] A compensatory product should thus be administered to this subject, preferably locally in the tumor, preferably together with the conventional treatment of cancer. Such a compensatory product may be selected from IL-17 producing γδ T lymphocytes; recombinant IL-22 (rIL-22) and/or IL-17 (rIL-17); phosphoantigenic synthetic ligands of γδ T lymphocytes [preferably together with recombinant IL-1b (rIL-1b) and/or IL-23 (rIL-23)], such as bromohydrin pyrophosphate (BrHPP, active pharmaceutical ingredient in Phosphostim) and Vδ2 T lymphocytes activators such as biphosphonates (zoledronate) and/or clodronate.

[0453] The previously mentioned compensatory products are preferably injected locally into the tumor or in a tumor bed.

[0454] Also herein provided, is a pharmaceutical composition comprising such a drug or compensatory molecule or a combination of identical or different drugs or compensatory molecules, in association with a pharmaceutically acceptable excipient or diluent.

[0455] Appropriate excipient, diluant or carrier usable in the all present invention may be selected for example from saline, isotonic, sterile or buffered solutions, etc. They can further comprise stabilizing, sweetening and/or surface-active agents, etc. They can be formulated in the form of ampoules, flasks, tablets, or capsules, by using techniques of galenic known per se.

[0456] The pharmaceutical composition mentioned previously may be administered to the subject in need thereof, before, during and/or after any treatment of cancer described previously. It is preferably administered during or after said treatment, for example 24 hours, two days, three days or four days after the treatment.

[0457] For example, in a particular embodiment of the present invention, the compensatory products are IL-17 producing γδ T lymphocytes which may be advantageously administered to a subject in need thereof, two days after exposition of said subject to a treatment of cancer using radiotherapy or a chemotherapy wherein, for example, DX is administered to the subject.

[0458] Also herein described are compensatory molecules for use in the treatment of cancer, preferably in combination with a conventional treatment of cancer, in particular a chemotherapeutic treatment of cancer, in a subject identified, by a method as herein described, as resistant to a conventional treatment of cancer.

### Method to Prevent or Treat a Disease

[0459] The present invention also relates to a method for preventing or treating a cancer, as herein defined, comprising the administration to a mammal, in particular a human, in need thereof, of at least one compound selected from the previously described compensatory molecules, preferably together with (in combination with) a distinct therapeutic agent, typically an agent used in a conventional treatment of cancer as defined previously.

[0460] A subject in need of a compensatory molecule is subject that has been tested and identified as resistant to a treatment of cancer according to the method described above.

[0461] In a particular embodiment of the present invention, the previously described method for treating cancer is performed on a subject having a tumor before surgical resection thereof.

[0462] In another particular embodiment of the present invention, the previously described method for treating cancer is performed on a subject having a tumor after surgical resection thereof.

[0463] The above method to treat a disease may comprise a step of directly injecting at least one selected compensatory molecule in the tumour, or in the tumor bed, of the subject in need thereof.

### Screening Methods

[0464] The present invention also provides a method for screening or selecting a compound that is able to modify the activity of the immune system towards a tumor cell, in particular to trigger an immunogenic tumor cell death, the method comprising a step of detecting and/or measuring the level of expression, by a particular tumor cell, of a functional immunogenic cell death-associated molecule as herein described, in the presence of a test compound, wherein a modified expression in comparison with a control cell that has not been exposed to or contacted with the test compound, is indicative of the capacity of said compound to modify the activity of the immune system towards said cell.

[0465] The present invention further provides a method for screening a compound usable for treating a cancer, as a compensatory product according to the present invention, in a subject having an altered nucleic acid, an altered nucleic acid expression, or an abnormal expression or activity of the protein corresponding to said nucleic acid, said method comprising determining in vitro, in vivo or ex vivo the ability of a test compound to (i) restore a functional expression of said altered or abnormal protein (ii) modulate (i.e., induce, increase, or decrease) the expression or activity of said protein, or (iii) modulate the expression or activity of a ligand of said protein.

[0466] The compounds identified with one of the herein described screening methods may be used, in the context of the present invention, as compensatory molecules.

[0467] Other characteristics and advantages of the invention are given in the following experimental section (with reference to FIGS. 1 to 46), which should be regarded as illustrative and not limiting the scope of the present application.

### Experimental Part

### Example 1

### IL-1β-Dependent Contribution of IL-17 Producing γδT Cells in the Efficacy of Cytotoxic Anticancer Therapies

[0468] By triggering an immunogenic cell death modality, some anticancer compounds including anthracyclines elicit tumor-specific IFN-γ producing CD8⁺T cells that are mandatory for therapeutic success. This adaptive immune response depends on IL-1β produced by DC confronted with or exposed to anthracycline treated tumor cells. Inventors analyzed the influence of immunogenic chemotherapy on the tumor microenvironment to identify inflammatory components which link innate and cognate immune responses. Inventors herein demonstrate that distinct subsets of γδ T lymphocytes (Vγ4⁺ and Vγ6⁺) colonized tumors, where they proliferate and become potent IL-17 producers upon chemotherapy. In the present experiment, IL-17A production by γδ T cells fully depended on the DC mediated IL-1β production and aryl hydrocarbon receptors also contributed to this process. In Vγ4/6^{-/-} mice or in the absence of a functional IL-17/IL-17 receptor (IL-17R) pathway or upon blockade of AHR, the response to immunogenic cell death or the efficacy of chemotherapy was compromised. Conversely, adoptive transfer of γδ T cells increased the efficacy of anthracycline-based chemotherapy, under the condition that these cells express the IL-1R1. Therefore, IL-17 producing γδT cells or lymphocytes γδT17 cells) represent a novel link between cell death and cognate immunity during anticancer chemotherapy.

[0469] While the contribution of IFN-γ to tumor surveillance and anticancer immune responses is clearly established, that of the IL-17A/IL-17R signaling pathway remains controversial (Kryczek et al., 2009; Martin-Orozco et al., 2009; Wang et al., 2009). In tumor models where CD4⁺ T cells are the source of IL-17, this cytokine promotes IL-6-mediated Stat3 activation, acting as a pro-tumorigenic trigger (Kortylewski et al., 2009; Wang et al., 2009). Thus, inventors supposed that IL-17 could be one of the factors that link chronic inflammation to cancer development. However, in adoptive transfer experiments, IL-17-producing CD8⁺ T cells could reduce the volume of large established tumor, presumably by differentiation into long-lasting IFN-γ producers (Hinrichs et al., 2009). Therefore, the source and/or the targets of IL-17 must determine whether this cytokine enhances or reduces tumorigenesis. Interestingly, it appears that the production of IL-17 is strongly dependent on signaling via aromatic AHR, a ligand-activated transcription factor widely expressed in many tissues including lymphoid organs. In particular, Th17 cells and dendritic cells express high levels of AHR. Activation of AhR by yet elusive endogenous ligands markedly increased the proportions of Th17 cells and their production of IL-17 (Veldhoen et al., 2008). However, before the present invention it was unknown whether and how AHR impacts on anticancer immune responses at the level of IL-17 production.

[0470] Similarly, the contribution of γδT cells in tumor immunosurveillance is still elusive (Hayday, 2009). In humans, γδ 1 T cells have been shown to either mediate immunosuppressive activities (Peng et al., 2007) or to be associated with a reduced occurrence of cancers in transplanted patients bearing a CMV infection (Dechanet et al., 1999). In contrast, γδ 2 T cells can be activated by various synthetic ligands to produce Th1-like cytokines and exhibit cytotoxic functions against tumors (Kabelitz et al., 2007). Although various γδ T cell subsets have been reported to be able to produce IL-17 during microbial infection or autoimmune disorders of mice (O'Brien et al., 2009; Shibata et al., 2007), no data are available on the incidence and functional relevance of IL-17-producing γδ T cells in cancer. γδT17 cells have been reported to share most phenotypic markers with Th17 (expression of CCR6, RORγt, AHR, IL-23R, IL-17A, IL-22) (Martin et al., 2009). They depend upon TGF-β but not IL-23 or IL-6 for their generation and maintenance (Do et al.) and they were unrestricted by Vγ usage (although they were mostly Vγ2Vγ3 in the context of mycobacteria (Martin et al., 2009) and V74 in experimental autoimmune encephalitis (Sutton et al., 2009)). Recent work suggests that thymic selection does little to constrain γδ T cell antigen specificities, but instead determines their effector fate. When triggered through the T cell receptor, ligand-experienced cells make IFN-γ, whereas ligand-naïve γδT cells produce IL-17 (Jensen et al., 2008). It is herein demonstrated that a therapy-induced immunogenic cancer cell death which stimulates a therapeutic anti-cancer immune response influences the composition and the architecture of the immune infiltrate present in tumors, which in turn contributes to the control of residual tumor cells. Inventors herein show that, in response to an immunogenic chemotherapy with anthracyclines and OXP, an early infiltration by γδ T17 cells is a prerequisite for optimal colonization of tumor beds by CD8⁺ T lymphocytes, eventually leading to tumor growth retardation or regression. Inventors demonstrate that DC producing IL-1β in response to dying tumor cells and AHR signaling determine and optimize IL-17 release by γδ T cells. Finally, they show that both γδ T cells and the IL-17/IL17 receptor signaling are required for inducing an optimal anticancer response of a subject undergoing a chemotherapy and that the adoptive transfer of γδ T17 cells increases the therapeutic efficacy of an anticancer chemotherapy.

### Material and Methods

[0471] Mice.

[0472] Wild type C57bl/6 (H-2^{b}) and BALB/c (H-2^{d}) mice aged between 7-12 weeks were purchased from Harlan (Gannat, France). Nude mice were bred in the animal facility of IGR. TCR δ^{-/-} (H-2^{b}), IL-1R1^{-/-} (H-2^{b}) and IL-17Rα^{-/-}(H-2^{b}) mice were bred at CDTA, Orléans, France through BR and PP (as for TCR δ^{-/-}). Vγ4γ6^{-/-} mice (H-2^{b}) were kindly provided by GM and KI. IL-23p19^{-/-} (H-2^{b}) were kindly provided by FP. CD1d^{-/-} and CCR6^{-/-} (H-2^{b}) were bred at St Vincent de Paul Hospital AP-HP, Paris, France and provided by KB. The experimental protocols were approved by the Animal Care and Use Committee in the animal facility of Institut Gustave Roussy.

[0473] Cell Lines and Reagents.

[0474] CT26 (H-2^{d}) colon cancer, MCA205 sarcoma (H-2^{b}), TS/A mammalian cancer (H-2^{d}) and EL-4 thymoma (H-2^{b}) were cultured in RPMI1640 supplemented with 10% FBS, 2 mM L-glutamine, 100 IU/ml penicillin/streptomycin, 1 mM sodium pyruvate, 1 mM non-essential amino acids, and 10 mM HEPES at 37° C., 5% CO₂. All media were purchased from GIBCO, France. AHR antagonist CH223191 was from Calbiochem. Recombinant mouse interleukin-1β (IL-1β), IL-23, IL-6, TGF-β and IL-18 BPd/Fc were from R&D system. DX hydrochloride (D1515) and MTX dihydrochloride (M6545) were from Sigma Aldrich. Mouse IL-17, IL-1β ELISA kits were purchased from eBioscience. Mouse IL-22, IL-23 ELISA kits were purchased from R&D system. Antibodies for CD45.2 (clone 104), CD3E (clone 145-2C11), CD4 (clone GK1.5), CD8α (clone 53-6.7), TCR δclone GL-3, CD69 (clone H1.2F3), IL-17A (clone TC11-18H10) or IFN-γ (clone XMG1.2) for surface or intracellular staining were from BD bioscience or eBioscience. Neutralizing antibodies for IL-17 (MAB421), IFN-γ (XMG1.2), CCL20 (MAB760), IL-23 (AF1619), IL-23R (MAB1686) and IL-6 (MAB406) were from R&D system. LIVE/DEAD Fixable Dead Cell Stain Kit, DiOC6(3) and DAPI were purchased from Molecular Probes, Invitrogen. CpG oligodeoxynucleotide (ODN) 1668 was from MWG Biotech AG.

[0475] Tumor Models and Chemo/Radiotherapy.

[0476] 0.8 million MCA205 or CT26 or TS/A tumor cells were inoculated subcutaneously near the thigh into C57Bl/6 (H-2^{b}) or BALB/c (H-2^{d}) mice. Anthracyclines-based chemotherapy was performed in MCA205 and CT26 models by intratumoral injecting DX (2 mM, 50 μl) when tumors reached the size 25-40 mm². Radiotherapy was performed by local X-ray irradiation (10 Gy, RT250, Phillips) at the unshielded tumor area when TS/A tumor reached the size 40-60 mm².

[0477] Gene Expression Assays.

[0478] Tumors from mice either treated with DX or PBS were removed 8 days after treatment. Whole RNA was extracted using RNeasy Mini Kit, QIAGEN from pieces of tumor homogenates. 5 μg of RNA from each sample were reverse-transcribed using Quantitect Reverse Transcription Kit (QIAGEN). Gene expression assays were performed with TaqMan® 96 well Plates customized to test cytokines, chemokines as well as transcription factors using StepOnePlus™ Real-Time PCR System. PPIA was chosen as the endogenous control to perform normalization between different samples.

[0479] Tumor Dissection and Flow Cytometry.

[0480] Tumor burdens were carefully removed, cut into small pieces with scissors within digesting buffer (400 U/ml Collagenase IV and 150 U/ml DNase I in RPMI1640) and incubated for 30 min at 37° C. Single cell suspension was obtained by grinding the digested tissue and filtering through 70 μM cell strainer. After washing with PBS, cells were resuspended at 2×10⁷/ml, blocked with 10 μg/ml anti-CD16/CD32 (eBioscience) in PBS containing 2% mouse serum for 5 min at 4° C. 2.5 μg/ml of antibodies were used for surface staining at 4° C., 30 min. LIVE/DEAD Fixable Dead Cell Stain Kit was used to distinguish live and dead cells. For intracellular staining, freshly isolated cells were treated with, 50 ng/ml PMA, 1 μg/ml ionomycin and Golgi-stop (BD Pharmingen), 4 hrs, 37° C. in RPMI containing 2% mouse serum (Janvier, France). Cells were then washed with PBS and stained with anti-IFN-γ (PE-cy7) and anti-IL-17 (PE) using BD Cytofix/Cytoperm™ Kit following the instructions.

[0481] Protein Extraction.

[0482] Tumors were mechanically dissociated with lysis buffer (T-PER Tissue Protein Extraction Reagent, PIERCE) containing protease inhibitor (complete Mini EDTA-free, Roche). Tumor lysate was then centrifuged at 10000×g, 5 min, 4° C. to obtain supernatant.

[0483] Purification and Adoptive Transfer of γδ T Cells.

[0484] Naïve C57Bl/6 mice aged between 8-10 weeks were sacrificed and the skin-draining lymph nodes (LNs) including inguinal, popliteal, superficial cervical, axillary and brachial LNs were collected. LNs were squeezed with tweezers gently in digesting buffer, kept at 37° C. for 20 min and then pass through 40 μM cell strainer to get single cell suspension. Dead cells were removed using Dead Cell Removal Kit (Miltenyi Biotec) before purifying γδ T cells with TCRγ/δ⁺ T Cell Isolation Kit (Miltenyi Biotec). An autoMACS™ Separator was used with the recommended programs. Purity of this isolation normally reached 95%. The TCR δ⁻ CD3⁺ cells fraction was also collected from the final separation step and was called ‘non γδ T’ cells for some experiments. Day 2 after DX or PBS treatment, 2.5×10⁵ cells were injected directly into the tumor with insulin syringes in adoptive transfer setting.

[0485] T Cell Priming and Tumor Vaccination.

[0486] EG7 cells were pretreated either with 5 μg/ml OXP or left untreated for 24 hrs, washed thoroughly and injected at 1 million/50 μl into the syngeneic mice foodpad. CpG/OVA (CpG (5 μg/mouse), OVA (1 mg/mouse)) and PBS injection were used as positive and negative controls. In some setting, neutralizing antibody (200 μg/mouse) for IL-17A or isotype control antibody was injected i.p. 5 days later, the popliteal lymph node cells were harvested, seeded in 96 well plate at 3×10⁵/well and restimulated with 1 mg/ml OVA protein. IFN-γ secretion was measured by OptEIA™ Mouse IFN-γ ELISA kit (BD Bioscience). MCA205 cells were treated with 2 μM MTX for 18 hrs, washed thoroughly and injected into left flank subcutaneously at 0.3 million/mouse. PBS was used as control. Mice were rechallenged with 5×10⁴ live MCA205 cells in the right flank 7 days later. Tumor growth was monitored every 2-3 days.

[0487] DC-Tumor Mixed Lymphocyte Cultures.

[0488] DC were propagated in Iscoves's medium (Sigma Aldrich) supplemented with J558 supernatant, 100 UI/ml Penicillin, 100 μg/ml Streptomycin, 2 mM L-glutamine, 50 μM 2-mercaptoethanol (Sigma), 10% heat-inactivated and filtered, 10% FCS and 40 ng/ml GM-CSF. DC were used between day 8 and 12 when the proportion of CD11c/MHC class II+ cells was >80%. In mixed cocultures, DC were seeded at 10⁵/100 μl/well in U bottom 96 well plates. Tumor cells were treated with 25 μM DX or 2 μM MTX for 16 hrs, washed in PBS and added into these wells at 7.5×10⁵/100 μl/well. 2×10⁴/50 μl γδ T cells were added into the wells 12 hrs later. Supernatant was collected 48 hrs later.

[0489] Statistical Analyses of Experimental Data.

[0490] All results are expressed as means±standard error of the mean (SEM) or as ranges when appropriate. For two groups, normal distributions were compared by Student's t test. Non-normal samplings were compared using the Mann-Whitney's test or Wilcoxon matched paired test when appropriate. The log-rank test was used for analysis of Kaplan-Meier survival curve. Statistical analyses were performed using Prism 5 software (GraphPad, San Diego, Calif.). P values of <0.05 were considered significant.

### Results

### Patterns of Cytokine/Chemokine Production Post-Chemotherapy

[0491] Anthracyclines induce immune responses that culminate in CD8⁺T cell- and IFN-γ/IFN-γ R dependent antitumor effects (Ghiringhelli et al., 2009). To further study chemotherapy-induced immune effectors at the site of tumor retardation, inventors performed quantitative RT-PCR to compare the transcription profile of 40 immune gene products expressed in MCA205 tumors which were regressing in response to chemotherapy with the anthracycline DX 8 days post-treatment, with that of progressing tumors due to the absence of treatment (PBS control) (FIG. 1A). Several Th1-related gene products were specifically induced in regressing tumors (FIG. 1B). Thus, the Th1 transcription factors Eomes and Tbx21 (also called T-bet), as well as the end product IFN-γ, were increased 4-5 fold in doxorubicine (DX) versus PBS-treated tumors (FIG. 8A). Unsupervised hierarchical clustering indicates that IFN-γ production correlates with that of the transcription factor Tbx21, which is the quintessential Th1 transcription factor. By day 3-7, the protein levels of IFN-γ also increased in regressing MCA205 sarcoma (FIG. 1C). Other surrogate markers of Th1 responses (lymphotoxin-β, Cc15, Cxcl10, Cxcl9, TNF-α) were also significantly induced at the mRNA level following anthracycline treatment (FIG. 1B). Unexpectedly, another set of gene products were also overexpressed in the context of anthracycline-induced tumor regression. These genes encoded IL-7R, IL-21, AHR, Cxcl2 and Foxp3, suggesting that inflammation and/or tissue repair took place in the tumor bed (FIG. 1B, FIG. 8A). Indeed, on days 3 to day 8 post-chemotherapy, the protein levels of the inflammatory cytokine IL-17 were significantly increased within tumor homogenates (FIG. 1C, right panel). Reenforcing this finding, we show that AHR, a sensor of small chemical compounds, is involved in the success of anthracyclines based therapy in this model. CH-223191 is a pure antagonist of AHR since it does not have any agonist actions up to 100 μM (Kim et al., 2006). Blocking AHR with CH-223191 markedly reduced the efficacy of DX on established cancers in vivo (FIG. 1D) although CH-223191 had no cell-autonomous effects on the tumor cells, alone or in combination with anthracyclines (FIG. 8B). Moreover, DX (compared with PBS) induced a 3-fold increase in the proportions of both IFN-γ and IL-17 producing tumor infiltrating lymphocytes (TILs) as tested by flow cytometry (FIG. 1E). All together, these data show that chemotherapy modify the chemokine/cytokine tumor microenvironment, leading to early Th17-geered inflammation together with a marked Th1 polarization.

[0492] γδ T Lymphocytes are the Major Source of IL-17 in Several Models of Anticancer Chemotherapy.

[0493] To identify the cellular source of IFN-γ and IL-17, TILs were immunophenotyped by a combination of cell surface staining and intracellular detection of the cytokines with flow cytometry. Careful analyses revealed that 8 days post-chemotherapy in MCA205 sarcomas, the major source of IFN-γ were CD8⁺ T cells, while that of IL-17 were mostly TCR δ⁺ T cells rather than CD4⁺ Th17 cells (FIG. 2A). Inventors further analyzed the IFN-γ and IL-17 production by each subset of TILs. It turned out that CD4⁺ T cells could produce IFN-γ and a small amount of IL-17 while CD8⁺T and γδ T cells were polarized to become potent producers of IFN-γ and IL-17 respectively. Doxorubicin-based chemotherapy substantially enhanced IFN-γ production by CD8⁺ and CD4⁺ TILs as well as IL-17 production by γδ TILs (FIG. 2B) and induced a more intense infiltration of these cytokine producers (FIG. 2C). A kinetic study indicated that γδ TILs invade MCA205 tumor beds at early time points (FIG. 2D), rapidly divide (as indicated by the expression of Ki67) (FIG. 2E) and produce IL-17 shortly after chemotherapy, with significant increases over the background 4 days after anthracyline injection (FIG. 2D, left panel). This early induction of IL-17 contrasts with the comparatively late induction of IFN-γ production by CD8⁺T cells, which emerged 8 days after chemotherapy (FIG. 2D, right panel).

[0494] To generalize these findings, inventors systematically immunophenotyped TILs in CT26 colon cancer treated by a single intratumoral injection of DX which significantly retarded tumor growth (FIG. 9A). Indeed, the majority of IL-17+ TILs were CD45⁺CD3^{bright} cells and they failed to express CD4 but were positively stained with anti-TCR δ specific antibodies (FIG. 9B). Consistently, chemotherapy increased the frequency of IFN-γ producing CD8⁺T lymphocytes (Tc1) (FIG. 9C) and IL-17-producing γδ T cells (γδ T17) (FIG. 9D) among TILs. Next, inventors monitored transplantable TS/A mammary carcinomas treated with local radiotherapy which operates in a T cell-dependent manner (Apetoh et al., 2007). Irradiation of TS/A tumors led either to tumor regression (TR) or to no response and hence tumor progression (TP) (FIG. 3A). An accumulation of both Tc1 (FIG. 3B) and γδ T17 (FIG. 3C) lymphocytes was found in those tumors that responded to radiotherapy, but not in those that continued to proliferate or in untreated controls. Importantly, in all three tumor models that were tested, a clear correlation was observed between invading γδ T17 and Tc1 cells in tumor beds (FIG. 2F, FIG. 3D, FIG. 9E). Thus, chemotherapy triggers the accumulation of cytokine producing TILs in the tumor bed. This applies to IFN-γ-producing CD8⁺ T cells, which have previously been shown to contribute to the chemotherapy-induced anticancer immune response (Ghiringhelli et al., 2009), as well as to IL-17-producing γδ T cells, which inventors decided to characterize at the functional level.

[0495] Most γδ T17 TILs had an effector memory phenotype which was preponderantly CD44⁺ CD62L⁻ CD69⁺ granzyme B⁺. γδ T17 TILs did not express CD27, CD122, Scart 2 (a marker of γδ T17 cells residing in skin draining lymph nodes), CD24, c-kit or NKG2D (FIG. 10). Flow cytometry indicated that around 60% of tumor filtrating γδ T17 utilized Vγ4 chain (FIG. 10) but expression of Vγ1 and Vγ7 chain was rarely found (data not shown). We then sorted γδ T17 TILs which do not express Vγ1, Vγ4 or Vγ7 and performed single-cell PCRs (Boucontet et al., 2005) to examine their Vγ chain usage. These experiments revealed that 21 out of 23 clones contained a functional Vγ6 rearrangement identical to the one found in fetal γδ T cells, indicating that most γδ T17 TILs express either Vγ4 or Vγ6.

[0496] Inventors conclude that, during chemotherapy or radiotherapy-induced tumor regression, distinct subsets of γδ T cells accumulate in tumor beds and become γδ T17 cells, correlating with (and presumably preceding) the accumulation of Tc1 cells.

### The IL-17/IL-17R Pathway is Involved in the Immunogenicity of Cell Death

[0497] Since both γδ T17 and Tc1 cells accumulated within tumors after chemotherapy or radiotherapy in a coordinated fashion, inventors determined whether neutralizing antibodies directed against their signature cytokines IL-17 and IFN-γ could mitigate the efficacy of anticancer therapies. The neutralization of either IFN-γ or IL-17 negatively affected the growth-retarding effect of DX against MCA205 tumors (FIG. 4A). Inventors have reported that specific anti-tumor immune response relies on CD8⁺T cells which could be primed by tumor cells undergoing immunogenic cell death and developed a system in which IFN-γ production by OVA-specific T cells could be triggered by OXP-treated EG7 cells (Ghiringhelli et al., 2009). Inventors utilize this system to check whether IL-17 is involved in initiating the specific anti-tumor response, comparing normal wild type (WT) with IL-17Rα^{-/-} mice. In this assay, the absence of IL-17Rα fully abolished antigen-specific T cell priming in response to dying cells, yet had no negative effect to T cell priming by OVA holoprotein admixed with CpG oligodeoxynucleotides (FIG. 4B). Consistently, a neutralizing anti-IL-17A antibody (but not the isotype control antibody) markedly impaired the OVA-specific T cell response to OXP-treated EG7 cells (FIG. 4C). Since Th1/Tc1 immune responses against dying tumor cells mediate a prophylactic protection against a rechallenge with live tumor cells (Apetoh et al., 2007; Ghiringhelli et al., 2009), inventors addressed the functional relevance of IL-17/IL-17Rα pathway in such a protective immunity. The subcutaneous injection of anthracycline mitoxanthrone (MTX) treated MCA205 sarcoma cells could protect WT mice (but not athymic nude mice) against rechallenge with live MCA205 tumor cells (FIG. 4D). The efficacy of this vaccination was attenuated in IL-17Rα^{-/-} mice. Since IL-17 was not significantly produced by CD4⁺ T cells, neither in the draining LN (not shown) nor in tumor beds during chemotherapy (FIG. 2A, 2B, FIG. 9B), they refrained from investigating Th17 cells and rather focused on γδ T and NKT cells as potential IL-17 producers (Mills, 2008; Pichavant et al., 2008) that might contribute to the anticancer vaccination by dying tumor cells. While CD1d^{-/-} mice, which lack NKT population (Godfrey et al., 2009), were undistinguishable from WT controls in their ability to protect themselves against the live tumor cells rechallenge after dying tumor cell vaccine, Vγ4/6^{-/-} mice (Sunaga et al., 1997) exhibited a reduced capacity to mount an anticancer immune response (FIG. 4D). These results suggest that IL-17, IL-17R, as well as γδ T17 cells, all play an important role in the afferent phase of the immune response against dying tumor cells that includes T cell priming for IFN-γ production.

### γδ T Lymphocytes are Indispensable for the Efficacy of Chemotherapy

[0498] To further evaluate the contribution of γδ T cells to the therapeutic action of mitoxanthrone on established MCA205 sarcomas, such tumors were implanted in age and sex matched WT, TCR δ^{-/-}, Vγ4/6^{-/-} and then subjected to systemic chemotherapy. As compared to wild type controls, the absence of the TCR δ chain, as well as Vγ4 and Vγ6 γδ T cells greatly reduced the efficacy of chemotherapy (FIG. 5A).

[0499] Expression of CCR6 is a hallmark of Th17 cells at the phenotypic and functional (Reboldi et al., 2009) levels during some inflammatory processes. Inventors therefore analyzed the role of CCR6 in the efficacy of chemotherapy. Since CCL20 was abundant in tumor tissues post-chemotherapy (data not shown), they assessed whether γδ T17 cells could be recruited in a CCL20/CCR6-dependent manner. The tumoricidal activity of DX against CT26 was not affected by repetitive systemic injections of neutralizing anti-CCL20 mAb before and during anthracyclines treatment (FIG. 5B). Consistently, anthracyclines treatment against established MCA205 sarcoma remained efficient in CCR6 loss-of-function mice (FIG. 5C). Moreover, CCR6 deficiency did not influence tumor infiltration by γδ T17 (FIG. 11). Therefore, both Vγ4/γ6 γδ T cells and their effector molecular pathway IL-17/IL-17R are involved in the prophylactic and therapeutic efficacy of anticancer agents while CCR6 signaling seems to be indispensable for their colonization of tumor bed.

### IL-1β-Dependent Activation of γδ T Lymphocytes

[0500] To explore the molecular requirements for γδ T17 cell activation in situ, inventors sorted γδ T cells from the skin-draining lymph nodes (LNs) of naive mice (representing about 1% of the T cell pool contained in LN). Among these γδ T cells, around 70% harbored the Vγ4 TCR and they vigorously produced IL-17 (but not IFN-γ) upon stimulation with PMA/ionomycine (data not shown) (Do et al.). In contrast to Th17 cells (Ivanov et al., 2006), LN resident γδ T cells failed to produce IL-17 in response to TGF-β or IL-6, alone or in combination with IL-1β (FIG. 6A). However, LN-resident γδ T cells potently secreted IL-17A (and IL-22, not shown) in response to the combined stimulation with IL-1β plus IL-23 (FIG. 6A). TCR engagement also synergized with IL-113 (and to a lesser extent with IL-23) to trigger IL-17 secretion by LN-resident γδ T cells (FIG. 6B). It is noteworthy that these stimuli specifically activated IL-17 (FIG. 6A, 6B) but not IFN-γ production (data not shown) by γδ T cells. Since Vγ4⁺ and Vγ6⁺ γδ T cells were activated (as indicated by their Ki67⁺, GzB⁺, CD69⁺, IL-17⁺ phenotype) within tumor beds after chemotherapy, inventors addressed the question as to whether dying tumor cells could directly or indirectly (through myeloid antigen presenting cells) promote the activation of Vγ4⁺ and Vγ6⁺ T cells. Although doxorubicin-treated MCA205 cells failed to directly induce IL-17 (or IL-22, not shown) secretion by γδ T cells, they did so indirectly. Thus, bone marrow-derived DC (DC) that had been loaded with doxorubicin-treated MCA205 cells (FIG. 6C) or CT26 cells (not shown) but not with live tumor cells markedly stimulated the release of IL-17 (and IL-22, not shown) by γδ T cells (FIG. 6C). As a quality control for in vitro generated DC, the expression of CD11c, MHC class 11, CD11b and F4/80 was assessed. Only ‘qualified’ DC preparations that contain functional DC (>80% CD11c⁺MHCII⁺) rather than macrophages (>70% CD11b⁺F4/80⁺CD11c) can activate γδ T cells for IL-17 production when they encountered DX treated tumor cells (data not shown).

[0501] Dying tumor cells (exposed to doxorubicin) but not live tumor cells could trigger IL-1β production by DC (FIG. 6C and (Ghiringhelli et al., 2009)). The IL-17 production by γδ T cells was dependent on IL-1β since the IL-1R1/IL-1βantagonist IL-1RA entirely abrogated the DC/γδ T cell cross-talk in the presence of dying cells while IL-1β production was not modified (FIG. 6D). Blocking AHR could also hamper IL-17 production in this co-culture system. In contrast, neutralizing IL-23 or blocking IL-23R or blocking IL-18/IL-18R interaction failed to damp down the production of IL-17 (and IL-22, not shown) by the combination of DC, dying tumor cells and γδ T cells (FIG. 6D). It is conceivable that the γδ TCR might be engaged by an MHC class I-like molecule presented by DC because the IL-17 production by γδ T cells was significantly improved by cell contact or a TCR cross-linking Indeed, the supernatants (containing at least IL-1β) of BMDCs loaded with dying cells could not entirely substitute for dying cell loaded DC in these in vitro assays (not shown). Blocking AHR markedly attenuated IL-17 production by γδ T cells, both at the level of cytokine release (not shown) and on a per cell basis (FIG. 6E, left panel) in response to CD3 cross-linking and IL-1β and/or IL-23, yet did not affect γδ T cell viability (not shown) or their activation pattern (FIG. 6E, right panel).

[0502] Since inventors found that IL-1β was required for the production of IL-17 by γδ T cell in vitro, they assumed that γδ T cells might be activated locally by this cytokine. Indeed, the adoptive transfer of γδ T cells (instead of the non γδ T cells purified from naïve skin LNs) into tumor beds two days post-DX ameliorated the efficacy of chemotherapy (FIG. 7A) while infusion of γδ T cells into non-treated tumors (failing to release IL-113) could not control tumor outgrowth (FIG. 7A). However, when γδ T cells were derived from IL-1R1 loss-of-function mice, the synergistic antitumor effects of doxorubicine and adoptively transferred γδ T cells were lost (FIG. 7B), demonstrating the key role of endogenous IL-1β in driving the γδ T cell response.

[0503] Altogether, the present data indicate that chemotherapy-induced cell death stimulates DC to release IL-1β, which in turn is required for IL-17 production by γδ T cells. γδ T cells can act as enhancers of the immunological component of anticancer immune therapies, provided that they express the IL-1R.

### Conclusions

[0504] Example 1 demonstrate a critical role for a subset of γδ T cells, particularly the Vγ4 and Vγ6-expressing subsets, which produce the effector cytokine IL-17, in the adaptive immune response against dying tumor cells which contributes to the efficacy of anthracycline-based conventional anticancer chemotherapy. Inventor demonstrate that the IL-17/IL-17Rα signalling pathway is required for the priming of IFN-γ-secreting antigen-specific T cells by tumor cells exposed to chemotherapy (FIG. 4B, 4C). This tumor-specific Tc1-mediated immune response is essential for the protective anticancer immunity that is triggered by immunization with dying tumor cells (FIG. 4D) because this protective immune response is lost in athymic nude mice (FIG. 4D) or when CD8+ T cells are depleted (Casares et al., 2005) or when the IFN-γ/IFN-γR system is blocked either by injection of neutralizing antibodies or knockout of IFN-γ (Ghiringhelli et al., 2009). Accordingly, inventors found that the absence of IL-17Rα reduced the capacity of mice to mount a protective immune response against dying tumor cells (FIG. 4D).

[0505] When exploring the source of IL-17 production elicited by dying tumor cells, inventors found that γδ T cells were the quantitatively and functionally most important IL-17 producers, based on several observations. First, in the context of anticancer chemotherapy, γδ T17 cells accumulated within tumors (FIG. 2B, 2C, 3C, FIG. 9D). Indeed, most IL-17 producing cells were positive for γδ T markers (FIG. 2A, FIG. 9B). Secondly, antigen-specific CD4⁺ T cells in lymph nodes (LNs) draining the dying tumor cells are polarized to a Th1 cytokine (IL-2 and IFN-γ) secretion pattern (Ghiringhelli et al., 2009) instead of a Th17 pattern (data not shown). Also, IL-6 and TGF-β, two key regulatory cytokines essential for the differentiation of Th17 cells (Ivanov et al., 2006) were dispensable for the efficacy of chemotherapy (FIG. 12A, 12B), suggesting that Th17 cells are not required for the anticancer immune response that amplify the effect of chemotherapy. Thirdly, when popliteal lymph nodes were recovered from mice that had been injected with dying (but not live) tumor cells through footpad, the re-stimulation of LN-resident cells using anti-CD3E Ab+IL-23 readily enhanced IL-17 production (not shown), a feature common to memory T cells, especially innate NKT (Rachitskaya et al., 2008) and γδ T cells (Sutton et al., 2009) (FIG. 6B). Fourthly, the subset of NKT cell capable of producing IL-17 in LN(CD103⁺CD4⁻NK1.1⁻CCR6⁺ CD1d tetramer⁺) (Doisne et al., 2009) did not appear to be specifically triggered by dying cells in vivo (not shown). Moreover, CD1d^{-/-} mice, which lack NKT cells, were indistinguishable from WT mice when the efficacy of chemotherapy was assessed in prophylactic vaccination settings (FIG. 4D). Finally, knockout Vγ4/6 or TCR δ attenuated the protective antitumor vaccination with dying tumor cells (FIG. 4D) and reduced the efficacy of the anthracycline-based chemotherapy on established tumors (FIG. 5A).

[0506] In the context of immune responses stimulated by dying cancer cells, it clearly appears that IL-113, an inflammatory cytokine that is produced by dendritic cells (DC), plays a major role in stimulating IL-17 production and the anticancer function of γδ T cells. The key role of IL-1β in regulating γδ T cells function was shown by using IL-1RA in cocultures of DC/γδ T cells in the presence of dying tumor cells (FIG. 6D). Also, γδ T cells that lack IL-1R cannot amplify the tumoricidal action of anthracyclines as IL-1R expressing γδ T cells do (FIG. 7B). Interestingly, DC-mediated IL-1β secretion was also found mandatory for the polarization of CD8⁺ T cells towards a Tc1 pattern (Ghiringhelli et al., 2009). The herein provided results demonstrate the importance of DC, γδ T17 cells and Tc1 cells (IFN-γ producing CD8⁺ T lymphocytes) to favor optimal anticancer immune responses. Inventors noticed a strong correlation between γδ T17 and Tc1 cells post-chemotherapy in three different tumor models and the fact that the emergence of IL-17 production precedes that of IFN-γ production by Tumor Infiltrating Lymphocytes (TILs). It is well possible that besides helping developing Tc1 response, γδ T17 cells might enhance the chemoattraction of Tc1 effector cells into the tumor beds. These results are compatible with observations obtained in a cancer-unrelated context, microbial infection, in which γδ T17 associated with Th1 responses to exert protective immune response (Umemura et al., 2007). As IL-17 could not directly induce IFN-γ production or enhance proliferation of CD8⁺T cells (data not shown), the present results imply a causal relationship between the presence of γδ T17 cells and the recruitment of antitumor effector Tc1 cells into tumor beds.

### Example 2

### The Single-Nucleotide Polymorphism R554K (rs2066853) in AHR Gene Affects the Efficacy of Conventional Anti-Cancer Therapy in a Neoadjuvant Setting (Before Surgery) Breast Cancer Patients

[0507] The inventors observed that the single-nucleotide polymorphism (SNP) R554K (rs2066853-SEQ ID NO: 7) in AHR gene (NCBI Reference Sequences: AHR genomic DNA: NC_{—}000007.13 (SEQ ID NO: 1); AHR mRNA: NM_{—}001621.3 (SEQ ID NO: 2)) affects the efficacy of conventional anti-cancer therapy in a neoadjuvant setting in breast cancer patients (n=239). Indeed, the proportion of pathological complete responses was higher in AHR wild-type group than in mutated group of patients treated with anthracyclines (24.3% in patients carrying the AHR normal allele versus 11.4% in patient with the R554K mutated allele; p=0.02 by Chi² analysis) (FIG. 13). In other words, the AHR R554K mutated allele enhanced the probability of relapse in patients treated with anthracyclines. Other AHR polymorphisms have the same predictive value, in particular the following AHR SNPs: rs10250822 (SEQ ID NO: 3), rs11505406 (SEQ ID NO: 4), rs1476080 (SEQ ID NO: 5), rs17779352 (SEQ ID NO: 6), rs2074113 (SEQ ID NO: 8), rs2158041 (SEQ ID NO: 9), rs2282885 (SEQ ID NO: 10), rs34938955 (SEQ ID NO: 11), rs35225673 (SEQ ID NO: 12), rs4986826 (SEQ ID NO: 13), rs713150 (SEQ ID NO: 14), rs7796976 (SEQ ID NO: 15), and rs7811989 (SEQ ID NO: 16).

[0508] The numbers and percentages of patients enrolled in the case-control study are displayed in a contingency table (Table 3) based on the primary endpoint (pathological complete response) and the genotype of AHR-R554K (rs2066853) SNP.

TABLE 3

| | AHR-Arg554Lys | | AHR-Arg554Lys | |
|---|---|---|---|---|
| | mutated | | wild type | |
| | N (%) | | N (%) | |
| No pathological complete | 62 | (88.6) | 128 | (75.7) |
| response (No pCR) | | | | |
| Pathological complete | 8 | (11.4) | 41 | (24.3) |
| response (pCR) | | | | |

### Materials and Methods

### Clinical Study Design

[0509] The inventors retrospectively constructed patient database using data obtained from Institut Gustave Roussy (France). All patients provided written informed consent for enrollment in the study. Eligible patients had histologically confirmed sporadic breast cancer. All patients received an anthracycline-based chemotherapy before surgery (FEC protocol in neoadjuvant setting). This study was based on a retrospective cohort (n=197—patients not treated with Herceptin) and a case-control cohort (n=42) matched for age, tumor grade and hormone receptors. The primary endpoint of the study was the pathogical complete response. After generation of the patient database and collection of genomic DNA samples, genotyping and statistical analyses were performed in a blinded fashion. A total of 239 patients fulfilled the inclusion criteria. Chi square test was used to compare the distribution of clinical characteristics across the two genotype groups. All analyses were carried out using SPSS software, version 16 (IBM SPSS Statistics, France).

### Genotyping

[0510] DNA was isolated from frozen blood leukocytes from subjects. The TAQMAN Drug Metabolism Genotyping assay ID: C_{—}11170747_{—}20 was used to genotype the AHR G/A polymorphism (rs2066853). Briefly, 10 ng of genomic DNA was mixed with 5 μA, of 2× TaqMan Genotyping Master Mix (Applied Biosystems) and 0.25 μL of 40× genotyping assay in a final volume of 10 μL. Temperature cycling and real time fluorescence measurement were done using an StepOnePlus System (Applied Biosystems). The genotypes were assigned to each subject, by comparing the signals from the two fluorescent probes, FAM and VIC, and calculating the −log(FAM/VIC) ratio for each data point with the StepOne software v2.0(Applied Biosystems). The other AHR SNPs have been tested with the same procedure. Examples of the following TAQMAN Genotyping assays have been used: rs10250822 (SEQ ID NO: 3) (TAQMAN Genotyping assay ID: C_{—}2541466_{—}10), rs1476080 (SEQ ID NO: 5) (TAQMAN Genotyping assay ID: C_{—}8302430_{—}10), rs2282885 (SEQ ID NO: 10) (TAQMAN Genotyping assay ID: C_{—}2541460_{—}1_), rs2158041 (SEQ ID NO: 9) (TAQMAN Genotyping assay ID: C_{—}2541454_{—}30), rs713150 (SEQ ID NO: 14) (TAQMAN Genotyping assay ID: C_{—}2541463_{—}10), rs7796976 (SEQ ID NO: 15) (TAQMAN Genotyping assay ID: C_{—}30633941_{—}10), rs2074113 (SEQ ID NO: 8) (TAQMAN Genotyping assay ID: C_{—}16163703_{—}10), rs7811989 (SEQ ID NO: 16) (TAQMAN Genotyping assay ID: C_{—}29150577_{—}20) rs4986826 (SEQ ID NO: 13) (TAQMAN Genotyping assay ID: C_{—}25650166_{—}20), rs17779352 (SEQ ID NO: 6) (TAQMAN Genotyping assay ID: C_{—}25650165_{—}20).

### Example 3

### Restoration of the Immunogenicity of Cisplatin-Induced Cancer Cell Death

[0511] In this example, inventors specifically addressed the question why CDDP—in contrast to the related compound OXP—fails to induce immunogenic cell death. To address this question, they monitored several cell lines that express a series of cell death-relevant biosensors or biomarkers, allowing them to map the defect in the CRT exposure pathway elicited by CDDP. Furthermore, they designed a screening system allowing them to identify compounds that are inert with regard to apoptotic signalling, yet can restore CDDP's capacity to induce CRT exposure and to stimulate immunogenic cell death.

### Materials and Methods

### Reagents and Materials

[0512] Cell death was induced with MTX, CDDP (Sigma, Saint Louis, USA) or OXP (Sanofi-Aventis, Paris, France). Quinacrine and THAPS were purchased from Sigma. PeIF2a and eIF2a antibody has been purchased from cell signaling. Cell culture media and selection antibiotics were from Gibco.

### Cell Culture

[0513] U2OS, 293FT and HeLa were cultured in DMEM medium supplemented with 10% (v/v) fetal calf serum, 1 mM sodium pyruvate and 10 mM Hepes buffer. CT26, Lewis lung cell carcinoma and MC205 cells were grown in RPMI supplemented with identical components. U2OS clones were selected with 1 mg/ml G418 (Gibco) or Zeocin or 5 μg/ml Blasticidine and stable clones were kept under 200 μg/ml or 1 μg/ml selection respectively.

### Viral Transduction

[0514] Lentiviral particles for the transduction of cells with H2B-RFP have been produced in 293FT cells by means of the ViraPower lentiviral expression system (Invitrogen) following the manufacturer's instructions. For this purpose an H2B-RFP cDNA sequence has been cloned into the pLenti6 vector by means of the gateway system.

### HT-CRT Stably Expressing U2OS Cells

[0515] The HaloTag® sequence was amplified from a pHT2 plasmid (Promega) as NotI restriction fragment with the STOP codon removed from the Halotag sequence. For the PCR amplification the following primers were used: Forward: 5′-AAGCGGCCGCAATGGGATCCGAAATCGGTAC-3′ (SEQ ID NO: 453); Reverse: 5′-AAGCGGCCGCGCCGGCCAGCCCGGGGAGCC-3′ (SEQ ID NO: 454). PCR products were isolated on agarose gel, purified using the QIAquick Gel Extraction kit (Qiagen), and digested with the restriction enzyme NotI (Biolabs). The digested PCR product was ligated into the CRT-GFP plasmids at the NotI restriction site after removing the GFP sequence. Transfection of U2OS cells with the HaloTag®-CRT was carried out with Lipofectamine 2000 (Invitrogen) following the manufacturer's instructions. Stable clones stably were selected by means of Zeocin selection.

### CRT-GFP, Bax-GFP; G3BP-GFP; GFP-LC3 Stably Expressing U2OS Cells

[0516] U2OS cells have been transfected by means of Lipofectamin 2000 following the manufacturers instruction with either CRT-GFP, Bax-GFP, G3BP-GFP or LC3-GFP cDNA. Subsequently the cells have been stably selected using G418 selection antibiotic (Gibco). Resistant cells have been single cell sorted with a FACSvantage cell sorter and GFP expressing clones have been selected. Some of the clones have further been stably transduced with lentiviral particles expressing H2B-RFP. These cells have again been single cell sorted to identify double fluorescent clones.

### Compound Screen for CRT-Exposing Drugs Death Assays

[0517] One day prior to the experiment, 5×10³ U2OS cells stably expressing CRT-GFP and H2B-RFP were seeded into 96-well Black/Clear Imaging Plates pre-treated with poly-L-lysine (BD Biosciences, San Jose, Calif., USA). The ICCB known bioactive compounds library (Enzo life science) (BML2840), comprising 480 distincts compounds, was added at a concentration range from 90 nM to 48 μM in the presence or absence of 50 μM CDDP. The cells were incubated for 4 h at 37° C. and subsequently fixed with 4% paraformaldehyde (PFA) for 20 min. After washing with PBS 4 viewfields per well were acquired by means of a BD pathway 855 automated microscope. The images were segmented and analyzed for GFP-granularity and nuclear shape area using the BD AttoVision software version 1.6 before data mining. The data was statistically evaluated using graph pad. To avoid inter plate variations the data has been intra plate normalized by calculating the ratio to untreated controls for each datapoint.

### Cell Death Assays

[0518] 6×10⁵ U2OS cells were treated with the indicated cell death inducers for 16 h at the indicated concentration. Cell death was quantified by cytofluorometric analysis using a FACS Vantage (Becton Dickinson, Mountain View, USA) as described previously (REF). Thus, cells were stained with 40 nM 3,3 dihexyloxacarbocyanine iodide (DiOC₆(3); Molecular Probes, Eugene, Oreg., USA) for 30 min at 37° C. and concomitantly with 1 μg/ml propidium iodide (PI; Sigma Aldrich) for 30 min at 37° C. to determine the mitochondrial transmembrane potential. Data were statistically evaluated using CellQuest Pro software (Becton Dickinson, Mountain View, USA).

### Quinacrine Immunofluorescence

[0519] U2OS cells were treated with the indicated cell death inducers for 16 h at the indicated concentrations. Subsequently, cells were labeled with quinacrine as described previously (Martins et al., 2009). In short, cells were labeled with 1 μM quinacrine in Krebs-Ringer solution (125 mM NaCl, 5 mM KCl, 1 mM MgSO₄, 0,7 mM KH₂PO₄, 2 mM CaCl₂, 6 mM glucose and 25 mM Hepes, pH 7.4) for 30 min at 37° C. Thereafter, cells were stained with 1 μg/ml PI (Invitrogen) and 1 μg/ml Hoechst 33342 (Invitrogen) for 10 min, rinsed with Krebs-Ringer solution and fixed with 2% paraformaldehyde for 15 min at room temperature. Cells were examined with a BD Pathway™ 435 High-Content BioImager workstation (Becton Dickinson, Mountain View, USA) by using an UApo/340×20/0.75 objective (Olympus, Tokyo, Japan).

### Quinacrine Flow Cytometry

[0520] 6×10⁵ U2OS cells were treated with the cell death inducers for 24 h. After incubation in quinacrine solution (as described above), cells were rinsed and resuspended in PBS containing 1 μg/ml PI. The samples were analyzed by means of a FACS Vantage (Becton Dickinson) and the data was statistically evaluated using the CellQuest Pro software (BD Biosciences).

### ATP Release Assays

[0521] After cell death induction, extracellular ATP was measured by luciferin-based ENLITEN ATP Assay (Promega, Madison, USA) following the manufacturer's instructions. Intracellular ATP was measured using an ATP Assay kit (Calbiochem, Darmstadt, Germany) based on luciferin-luciferase conversion following the manufacturer's instructions. For assessment of the chemoluminescent signal, the plates were read in a Fluostar luminometer (BMG Labtech).

### Analysis of Surface Exposed CRT

[0522] Cells were treated with the indicated agents for 4 hours and the day after they were collected. For the HaloTag® staining, cells were incubated for 30 min with HaloTag® Alexa Fluor® 488 Ligand, diluted in DMEM medium containing 10% of fetal bovine serum. Then cells were washed and incubated in DMEM medium for 30 min. Thereafter, cells were rinsed with PBS and stained with 1 μg/ml PI (Invitrogen). For CRT immune staining, cells were washed twice with PBS and fixed in 0.25% paraformaldehyde in PBS for 5 min. After washing again twice in cold PBS, cells were incubated for 30 min with primary antibody, diluted in cold blocking buffer (2% fetal bovine serum in PBS), followed by washing and incubation with the Alexa488-conjugated monoclonal secondary antibody in a blocking buffer (for 30 min). Each sample was then analyzed by FACScan (Becton-Dickinson) to identify cell surface CRT. Isotype-matched IgG antibodies were used as controls, and the fluorescent intensity of stained cells was gated on PI-negative cells. The same staining procedure was applied to U2OS CRT-GFP expressing cells grown on coverslips using an Alexa546 coupled secondary antibody before analysis in a Leica TCS SPE confocal microscope (Leica Microsystems, Wetzlar, Germany).

### In Vivo Anti-Tumor Vaccination

[0523] 1×10⁶ MCA205 cells, untreated or treated with either OXP, CDDP were injected subcutaneously into 6-week-old female C57BL/6 mice (Janvier, Charles River) into the lower flank, whereas 5×10⁵ untreated control cells were inoculated into the contralateral flank 6 days later (Casares et al., 2005). Tumor growth was evaluated for at least 50 days. All animals were maintained in specific pathogen-free conditions, and all experiments were carried out according to the Federation of European Laboratory Animal Science Association guidelines. The Ethics Committee of Institut Gustave Roussy approved all the animal experiments.

### Results

[0524] Failure of Cisplatin to Induce Calreticulin (CRT) Redistribution from the Endoplasmic Reticulum (ER) Lumen to the Cell Surface.

[0525] To monitor the redistribution of CRT from the ER lumen to peripheral locations close to plasma membrane, inventors generated U2OS cells that stably express a CRT-GFP fusion protein (Snapp et al., 2006). Control experiments revealed that this protein was located in the ER lumen, where most of the endogenous CRT resides (not shown). Upon treatment with mitoxanthrone (MTX) or OXP, two immunogenic cell death inducers, CRT-GFP relocates from a preponderantly perinuclear near-to-diffuse location (which is seen in untreated control cells) to a more peripheral granular distribution (FIG. 14A). This increased “granularity”, which can be quantified using morphometric image analysis software {Rello-Varona, 2010 #37}, is only observed after treatment of the cells with MTX or OXP, but not after treatment with CDDP (FIG. 14A,B). Nonetheless, CDDP was able to induce chromatin condensation, the morphological hallmark of apoptosis as efficiently as MTX or OXP (percentage values in FIG. 14B). Indeed, pairwise comparisons were always performed at the IC₅₀ of both agents, which was ˜600 μM for OXP and ˜150 μM for CDDP in short-term experiments measuring imminent cell death (as indicated by a loss of the mitochondrial transmembrane potential, ΔΨₘ, see below). Surface immunofluorescence staining of CRT (revealed in red) confirmed that a few of the OXP-elicited CRT-GFP granules that were close to the cell surface, actually extruded CRT, which became accessible to a CRT-specific antibody. Again, no immunodetectable CRT was found on the surface of non-permeabilized cells treated with CDDP (FIG. 14 C).

[0526] Immunofluorescence detection of CRT requires several washing steps that might perturb the integrity of cells. To avoid this problem, inventors generated a chimeric protein that contains CRT in its N-terminus and the HaloTag® moiety in its C-terminus followed by the KDEL endoplasmic reticulum retention signal (FIG. 14D). This construct can be detected with commercially available HaloTag® ligands, which are either cell-permeable (as exemplified by HaloTag® Alexa Fluor® 488, green fluorescence) or cell-impermeable (as exemplified by HaloTag® TMR Ligand, red fluorescence) (FIG. 14E). The CRT-HaloTag® fusion protein underwent a similar intracellular redistribution (detected by staining with HaloTag® Alexa Fluor® 488) as did CRT-GFP when the cells were treated with MTX (not shown) or OXP. Moreover, U2OS cells expressing the CRT-HaloTag®fusion protein did not stain with the cell-impermeable HaloTag® ligand, unless they were treated with immunogenic cell death inducers such as OXP (FIG. 14F). Again, CDDP failed to induce the surface exposure of CRTHaloTag®, as determined by fluorescence microscopy (FIG. 14F) or cytofluorometric analysis of HaloTag® TMR Ligand-stained cells (FIG. 14G).

[0527] In conclusion, CDDP is unable to induce CRT exposure in conditions in which it does induce nuclear apoptosis.

### Failure of Cisplatin to Elicit ER Stress.

[0528] When used at their IC₅₀, CDDP and OXP had a comparable potency in inducing nuclear apoptosis (not shown). Moreover, both agents were able to induce mitochondrial perturbations that were assessed by two different methods. First, inventors determined the A11c, dissipation by means of the ΔΨₘ-sensitive fluorochrome DiOC₆(3) (FIG. 15A,B). Second, they measured the relocation of a Bax-GFP fusion protein (von Haefen et al., 2004) from a diffuse to a punctate (presumably mitochondrial) pattern (FIG. 15C,D). Both CDDP and OXP induced similar mitochondrial perturbations (FIG. 15).

[0529] Moreover, both agents induced a similar release of ATP, which is one of the obligatory signals linked to immunogenic cell death (Ghiringhelli et al., 2009). This result was obtained using two different methods, namely staining of the cells with the ATP-sensitive fluorochrome quinacrine (FIG. 15A,B), or by measuring the residual ATP content within the cells (FIG. 16C) or the ATP secreted into the supernatant by means of a luciferase-based assay (FIG. 16D). Thus, both agents lead to similar perturbations in energy metabolism.

[0530] However, OXP and CDDP ware rather different in their capacity to elicit the redistribution of G3BP-GFP (Tourriere et al., 2003) or LC3-GFP (Kabeya et al., 2000) from a diffuse to a punctiform distribution, which indicates the formation of stress granules (FIG. 17A,B) or of autophagosomes (FIG. 17C,D), respectively. This difference was particularly remarkable at early time points. The formation of stress granules and autophagosomes is subordinated to the mandatory phosphorylation of eIF2α, which is also required for the redistribution of CRT to the cell surface (Obeid et al., 2007b). Indeed, OXP was much more efficient than CDDP in inducing eIF2a phosphorylation on serine 51, as determined by means of a phospho-neoepitope-specific antibody (FIG. 17E). Accordingly, the activating phosphorylation of PERK, the principal eIF2a kinase elicited by chemotherapeutic agents (Panaretakis et al., 2009), was detectable shortly after treatment with OXP but not CDDP (FIG. 17E). Altogether, these results suggest that CDDP is much less efficient in inducing an ER stress response than OXP.

Identification of Thapsigargin as an Agent that Reestablishes CRT Relocalization in Response to Cisplatin.

[0531] To identify compounds that might restore the defective CRT exposure pathway in tumor cells responding to CDDP, inventors conducted a high-content screen. This screen was based on the utilization of the ICCB library whose 480 components were individually tested for their capacity to stimulate the redistribution of CRT-GFP in U2OS cells that were either left untreated (not shown) or cultured for 4 h in the presence of 150 μM CDDP (FIG. 18A). When the results obtained in the absence and in the presence of CDDP were plotted for each compound individually, one single agent, THAPS, was identified as being particularly efficient in inducing CRT-GFP granularity in the presence (but not in the absence) of CDDP (FIG. 18B). This result was confirmed in several independent determinations on U2OS cells expressing CRT-GFP (FIG. 18C,D). Moreover, THAPS was capable of inducing the redistribution of CRT-HaloTag® (FIG. 19A), as well as that of endogenous CRT (FIG. 19B), as determined using the cell-impermeable CRT-HaloTag® ligand or antibodies recognizing CRT, respectively. While THAPS alone (in the absence of CDDP) was comparably inefficient in inducing CRT-GFP granularity (FIG. 18D), CRT-HaloTag® exposure (FIG. 19A) or native CRT exposure (FIG. 19B), it was highly efficient in the presence of CDDP. Very similar results were obtained in additional cell lines, including human cervical carcinoma HeLa cells (not shown), mouse Lewis lung carcinoma cells (FIG. 19F), colorectal carcinoma CT26 cells (FIG. 19D), and methylcholanthrene-induced MCA205 fibrosarcoma cells (FIG. 19E). Of note, THAPS exhibited no major cytotoxic effects and did not increase the toxicity of CDDP in any of these cellular models, as exemplified for U2OS cells in which inventors monitored ΔΨₘ (FIG. 20A), intracellular ATP content (FIG. 20B,C,D) and extracellular ATP release (FIG. 20E). Confirming the strong correlation between CRT exposure and immunogenicity, CDDP-treated MCA204 cells were inefficient in inducing a protective anticancer immune response when injected subcutaneously into immunocompetent B6B157 mice one week before rechallenge with live tumor cells, in conditions in which OXP-treated MCA205 cells readily induce such a tumor-protective response (which precludes the growth of live MCA205 cells). However, the vaccine of dying cells, generated in the presence of CDDP combined with THAPS, elicited an effective anticancer immune response in vivo (FIG. 19F).

[0532] In conclusion, THAPS can reestablish the defective CRT exposure and associated immunogenicity of CDDP-induced cell death.

### Conclusions

[0533] In contrast to other cytotoxic agents including anthracyclins and OXP, CDDP fails to induce immunogenic tumor cell death that would allow the stimulation of an anticancer immune response and hence amplify its therapeutic efficacy. This failure to induce immunogenic cell death can be attributed to CDDP's incapacity to elicit the translocation of CRT from the lumen of the ER to the cell surface. The previous results show that, in contrast to OXP, CDDP is unable to activate the protein kinase-like ER kinase (PERK)-dependent phosphorylation of the eukaryotic translation initiation factor 2α (eIF2a). Accordingly, CDDP also failed to stimulate the formation of stress granules and macroautophagy, two processes that only occur after eIF2α phosphorylation. Using a screening method allowing the following of the voyage of CRT from the ER lumen to the cell surface, inventors identified in particular THAPS, an inhibitor of the sarco/endoplasmic reticulum Ca(2+) ATPase (SERCA) as a molecule that on its own does not stimulate CRT exposure, yet endows CDDP with the capacity to do so. Such a molecule is identified, in the context of the present invention, as a compensatory molecule. Thus, the combination of THAPS and CDDP effectively induced the translocation of CRT to the plasma membrane, as well as immunogenic cell death, while each agent alone was inefficient. Altogether, these results underscore the contribution of the ER stress response to the immunogenicity of cell death, in particular the ER Ca²⁺ fluxes for the translocation of CRT to the cell surface.

[0534] This experiment also allowed the identification of other compensatory molecules (in particular microtubules destabilizers), identified in the description part, which are also able to induce an immunogenic cell death.

### Example 4

### Restoration of the Immunogenicity of Conventional Treatment-Induced Cancer Cell Death

[0535] The protocol described in example 3 has been applied in example 4 to screen other compounds (FIG. 21) from the US drug collection library from MS discovery (US 090917A). These compounds have been screened at 1 μM.

[0536] Inventors analyzed the capacity of the drugs to induce immunogenic cell death or to render the per se non immunogenic anticancer agent mitomycin C immunogenic. To address this question, they generated several cell lines that express a series of cell death- or cell stress-relevant biomarkers. This screening system enabled the identification of compounds that can restore or confer the capacity to induce ER stress-dependent CRT exposure, autophagy-dependent ATP release as well as cell death-dependent HMGB1 release and thereby stimulate immunogenic cell death.

### Materials and Methods

### Reagents and Materials

[0537] Cell death was induced with MTX, MitoC (Sigma, Saint Louis, USA). Quinacrine, digoxin, digitoxin, Ouabain, strophantin, proscillaridin, sanguinarine, DAPI, Hoechst 33342, NAC and GSH were purchased from Sigma. Anti-CRT antibody has been purchased from Abcam and Annexin-FITC from Becton Dickinson. Cell culture media and selection antibiotics were from Gibco.

[0538] Cell Culture

[0539] U2OS and 293FT were cultured in DMEM medium supplemented with 10% (v/v) fetal calf serum, 1 mM sodium pyruvate and 10 mM Hepes buffer. MCA205 cells were grown in RPMI supplemented with identical components. U2OS clones were selected with 1 mg/ml G418 (Gibco) or Zeocin or 5 μg/ml Blasticidine and stable clones were kept under 200 μg/ml or 1 μg/ml selection respectively.

### Viral Transduction

[0540] Lentiviral particles for the transduction of cells with H2B-RFP have been produced in 293FT cells by means of the ViraPower lentiviral expression system (Invitrogen) following the manufacturer's instructions. For this purpose an H2B-RFP cDNA sequence has been cloned into the pLenti6 vector by means of the gateway system.

[0541] HMGB1-GFP Stably Expressing U2OS Cells

[0542] U2OS cells have been transfected by means of Lipofectamin 2000 following the manufacturers instruction with either HMGB1-GFP cDNA. Subsequently the cells have been stably selected using G418 selection antibiotic (Gibco). Resistant cells have been single cell sorted with a FACSvantage cell sorter and GFP expressing clones have been selected. The clones have further been stably transduced with lentiviral particles expressing H2B-RFP. These cells have again been single cell sorted to identify double fluorescent clones.

### Screen for CRT-Exposition Inducing Drugs

[0543] One day prior to the experiment, 5×10³ U2OS cells stably expressing CRT-GFP and H2B-RFP were seeded into 96-well Black/Clear Imaging Plates pre-treated with poly-L-lysine (BD Biosciences, San Jose, Calif., USA). The US Drug library (Microsource discovery) (US 090917A), comprising 1280 components, was added at a concentration range from 90 nM to 48 μM in the presence or absence of 50 μM CDDP. The cells were incubated for 4 h at 37° C. and subsequently fixed with 4% paraformaldehyde (PFA) for 20 min. After washing with PBS 4 viewfields per well were acquired by means of a BD pathway 855 automated microscope. The images were segmented and analyzed for GFP-granularity and nuclear shape area using the BD AttoVision software version 1.6 before data mining. The data was statistically evaluated using graph pad. To avoid inter plate variations the data has been intra plate normalized by calculating the ratio to untreated controls for each datapoint.

### CRT-Exposition Inducing, and ATP-, HMGB1-Releasing Drugs Death Assays

[0544] One day prior to the experiment, 5×10³ U2OS cells stably expressing CRT-GFP and H2B-RFP, HMGB1-GFP and H2B-RFP or WT cells were seeded into 96-well Black/Clear Imaging Plates pre-treated with poly-L-lysine (BD Biosciences, San Jose, Calif., USA). The US Drug library (Microsource discovery; US 090917A), comprising 1280 drugs that have reached clinical trial stages in the USA, was used at a concentration of 1 μM. CRT-GFP expressing cells were incubated for 4 h and HMGB1-GFP cell for 24 h at 37° C. and subsequently fixed with 4% paraformaldehyde (PFA) for 20 min. WT cells were incubate for 16 h before staining with quinacrine (see below). After washing with PBS 4 viewfields per well were acquired by means of a BD pathway 855 automated microscope. The images were segmented and analyzed for GFP-granularity, HMGB1-GFP nuclear intensity and quinacrine cytoplasmic granularity in addition the nuclear shape area was analyzed as a marker for apoptosis using the BD AttoVision software version 1.6 before data mining. The data was statistically evaluated using graph pad. To avoid inter plate variations the data has been intra plate normalized by calculating the ratio to untreated controls for each datapoint.

### Cell Death Assays

[0545] 6×10⁵ U2OS cells were treated with the indicated cell death inducers for 16 h at the indicated concentration. Cell death was quantified by cytofluorometric analysis using a FACS Vantage (Becton Dickinson, Mountain View, USA) upon Annexin/DAPI costaining according to the manufacturer's instruction. Data were statistically evaluated using CellQuest Pro software (Becton Dickinson, Mountain View, USA).

### Quinacrine Immunofluorescence

[0546] U2OS cells were treated with the indicated cell death inducers or compound library for 16 h at the indicated concentrations. Subsequently, cells were labeled with quinacrine as described previously (Martins et al., 2009). In short, cells were labeled with 1 μM quinacrine in Krebs-Ringer solution (125 mM NaCl, 5 mM KCl, 1 mM MgSO₄, 0.7 mM KH₂PO₄, 2 mM CaCl₂, 6 mM glucose and 25 mM Hepes, pH 7.4) for 30 min at 37° C. Thereafter, cells were stained with 1 μg/ml PI (Invitrogen) and 1 μg/ml Hoechst 33342 (Invitrogen) for 10 min, rinsed with Krebs-Ringer solution and fixed with 2% paraformaldehyde for 15 min at room temperature. Cells were examined with a BD Pathway™ 435 or 855 High-Content BioImager workstation (Becton Dickinson, Mountain View, USA) by using an UApo/340×20/0.75 objective (Olympus, Tokyo, Japan).

### Quinacrine Flow Cytometry

[0547] 6×10⁵ U2OS cells were treated with the cell death inducers for 24 h. After incubation in quinacrine solution (as described above), cells were rinsed and resuspended in PBS containing 1 μg/ml PI. The samples were analyzed by means of a FACS Vantage (Becton Dickinson) and the data was statistically evaluated using the CellQuest Pro software (BD Biosciences).

### ATP Release Assays

[0548] After cell death induction, extracellular ATP was measured by luciferin-based ENLITEN ATP Assay (Promega, Madison, USA) following the manufacturer's instructions. Intracellular ATP was measured using an ATP Assay kit (Calbiochem, Darmstadt, Germany) based on luciferin-luciferase conversion following the manufacturer's instructions. For assessment of the chemoluminescent signal, the plates were read in a Fluostar luminometer (BMG Labtech).

### Analysis of Surface Exposed CRT

[0549] For CRT immune staining, cells were washed twice with PBS and fixed in 0.25% paraformaldehyde in PBS for 5 min. After washing again twice in cold PBS, cells were incubated for 30 min with primary antibody, diluted in cold blocking buffer (2% fetal bovine serum in PBS), followed by washing and incubation with the Alexa488-conjugated monoclonal secondary antibody in a blocking buffer (for 30 min). Each sample was then analyzed by FACScan (Becton-Dickinson) to identify cell surface CRT. Isotype-matched IgG antibodies were used as controls, and the fluorescent intensity of stained cells was gated on PI-negative cells. The same staining procedure was applied to U2OS CRT-GFP expressing cells grown on coverslips using an Alexa546 coupled secondary antibody before analysis in a Leica TCS SPE confocal microscope (Leica Microsystems, Wetzlar, Germany).

### In Vivo Anti-Tumor Vaccination

[0550] 1×10⁶ MCA205 cells, untreated or treated with either OXP, CDDP were injected subcutaneously into 6-week-old female C57BL/6 mice (Janvier, Charles River) into the lower flank, whereas 5×10⁵ untreated control cells were inoculated into the contralateral flank 6 days later (Casares et al., 2005). Tumor growth was evaluated for at least 50 days. All animals were maintained in specific pathogen-free conditions, and all experiments were carried out according to the Federation of European Laboratory Animal Science Association guidelines.

[0551] The Ethics Committee of Institut Gustave Roussy approved all the animal experiments.

### HMGB1 Release ELISA

[0552] U2OS cells were seeded in 6 well plates 24 h before the experiment. The medium was changed to fresh DMEM before the treatment was applied. Supernatants were collected at 24 h post treatment, dying tumor cells were removed by centrifugation and supernatants were collected and shock frozen in liquid nitrogen. Quantification of HMGB1 in the collected supernatants was performed by enzyme-linked immunosorbent assay according to the manufacturer's instructions.

### Retrospective Clinical Study

[0553] We retrospectively constructed a patient database using data obtained from Institut Gustave Roussy. The patients were divided into the digoxin receiving and into the control group. For each digoxin receiving patient two control patients with identical tumor grade and chemotherapeutic treatment have been choosen. All digoxin receiving patients were treated with digoxin while receiving chemotherapy. Age at diagnosis, pathological tumor size, lymph node involvement, tumor grade, hormone receptors, endocrine treatments, occurrence of events and follow-up were extracted from medical files and recorded in the database. After generation of the patient database statistical analyses were performed in a blinded fashion. Survival rates were estimated using the Kaplan-Meier method.

### Results

### Cardiac Glycosides as Potent Inducers of CRT Exposure, and HMGB1 and ATP Emission.

[0554] To identify compounds that might evoke immunogenic cell death or restore the defective immunogenic cell death pathways in tumor cells responding to non immunogenic anticancer drugs, inventors conducted a high-content screen. This screen was based on the use of the US Drug library whose 1280 components were individually tested for their capacity to stimulate the redistribution of CRT-GFP (Martins et al., 2010), the release of HMGB1-GFP (Kepp et al., 2011) or the release of ATP, monitored by quinacrine staining in U2OS cells (Martins et al., 2010). The obtained results were normalized and rank scored to depict the drugs that are most potent in emitting CRT, HMGB1 and ATP (FIG. 28A). When plotted the result revealed, apart from the expected anthracyclins doxorubicin, epirubicin and mitoxanthrone, a functional clustering of Na/K-ATPase inhibitors most pronounce agents of the cardiac glycosides (CG) family as being most potent in exposing CRT, and emitting HMGB1 and ATP.

[0555] CRT-GFP redistribution as a surrogate marker for CRT-exposure was validated by means of a cluster analysis in which untreated control, MTX or CG treated CRT-GFP cells were additionally stained with anti-CRT and secondary Alexa546-labeled antibody. A minimum of 500 cells was analysed and increased CRT-GFP redistribution and CRT surface staining was scored. In most of all cases the treated cells displayed the phenotype of CRT-GFP redistribution together with CRT exposure (FIG. 28 B and C) validating the chosen screening model. The exposure of CRT was strongly dependent of reactive oxygen species as the antioxidants NAC and GSH significantly diminished CRT exposure upon Digoxin and Digitoxin treatment (FIG. 28E), which indicates that CGs induce CRT exposure pathways similar to anthracyclins.

[0556] All Na/K-ATPase inhibitors that were found amongst the 50 most efficient drugs of the screen were additionally tested for their capacity to expose CRT in WT cells assessed by antibody staining, a method distinct from the primary screening approach. As expected all the data from the primary screen could be validated with regard to Na/K-ATPase inhibitor induced CRT exposure (FIG. 28D). Most Na/K-ATPase inhibitors are intrinsically toxic due to their effect ion-homoeostasis, nevertheless CGs confer the ability to boost cardiac output by increasing cardiac contractility, mostly dependent on elevated intracellular calcium levels in cardiac myocytes. The CGs most widely used in clinics are digoxin and digitoxin, with the first being the most favoured. Focussing on these two inventors could show that both of them induce CRT exposure (FIG. 28F), HMGB1 release (FIG. 28G) and ATP release (FIG. 28H) in a dose dependent fashion but still within the therapeutic window for human application in the nanomolar range thereby validating the findings of the initial HTS approach.

### Digoxin Induced Tumor Immunogenicity and Clinical Implication

[0557] For further validation anti tumor vaccination studies in immunocompetent mice were conducted. Prior to the in vivo experiments the cytotoxicity of CGs has been reevaluated as it is know that rodent cells are inherently insensitive for CGs (Perne et al., 2009). As expected CT26 an MCA cell were intrinsically insensitive to CGs treatment even at μM ranges compared to human cells as evidenced by Annexin/DAPI staining of mouse and human cells treated with different concentrations of CGs. Nevertheless when combined with the non immunogenic cell death inducer MitoC, which by its own is incapable of exposing CRT, both CGs tested caused exposure of CRT in cotreated cells (FIGS. 29A and 29B).

[0558] MCA cells cotreated with digoxin and MitoC inocculated into immunocompetent mice kept living cell of the same kind from forming a tumor as compared to MitoC alone that failed to confer any vaccinating effect (FIG. 29C). Due to its incapacity to induce cell death at the concentrations used digoxin treated cells used for the same studies led to tumor formation at the vaccination side and were therefore not further evaluated.

[0559] Retrospective clinical studies on breat cancer patients revealed an increased overall survival in patients that have received digoxin during chemotherapy. Subgroup analysis of this data showed that this effect completely disappears in anthracyclin based chemotherapy but is even more pronounce in non anthracyclin based treatments (FIG. 29D).

### Conclusions

[0560] HTS designed for monitoring immunogenic signals induced by cytotoxic treatment enabled the screening of a huge number of drugs for their potential to cause or restore immunogenic cell death. Cardiac glycosides and in particular digoxin and digitoxin induced all features of immunogenic cell death. On the contrary MitoC fails to induce immunogenic tumor cell death that would allow the stimulation of an anticancer immune response and hence amplify its therapeutic efficacy. Thus, the combination of Digoxin with MitoC effectively induced immunogenic cell death, while each agent alone was inefficient. In addition clinical data underline the importance of this finding as CG co-treated patients depict an increased overall survival. Altogether, these results indicate again the contribution of ion fluxes especially Ca²⁺ for the translocation of CRT to the cell surface.

### Example 5

### A Single-Nucleotide Polymorphism in Anyone of CCR1, EIF2AK2, DNAJC10 Genes Affects the Efficacy of Conventional Anti-Cancer Therapy in a Neoadjuvant Setting (Before Surgery) Breast Cancer Patients

[0561] Inventors attempted to generate a molecular parameter signature of a pathological complete response (pCR) from two datasets of gene-expression arrays in neoadjuvant (before any surgery step) anthracycline treated-breast cancer patient cohorts (cohorts respectively herein identified HOUSTON FEC and IGGO FEC). One dataset of gene-expression arrays in neoadjuvant taxane treated-breast cancer patients was used as negative control (cohort IGGO TET). Inventors extracted a set of 43 genes from cohort HOUSTON FEC and 53 genes from cohort IGGO FEC/TET implicated in the “calreticulin” pathway from the global sets of genes identified previously in the description (using respectively 22 283 probes and 61 359 probes) to construct the molecular parameter signature.

[0562] Inventors performed a molecular classifier development analysis based on a supervised learning classification technique (Support Vector Machines—SVM) (FIG. 22). Leave-one-out cross-validation (LOOCV) was used to estimate the prediction accuracy of the rule determined on the training set (the previously mentioned 43 and 53 genes). One sample is left out, and the remaining samples are used to build the prediction rule, which is then used to classify the left-out sample. Then, they performed, in one hand, univariate analyses with contingency tables: the statistical significance of the discrimination between pCR and non-pCR patients was assessed by Fisher's exact test. In the other hand, multivariate methods, such as logistic regression and ROC analyses, were performed to validate the independency of the molecular parameter signature as compared to classical clinical factors [age at diagnosis, hormone receptors, tumor grade, tumor size (pT), node status (pN)] (FIG. 22).

[0563] To determine the optimal molecular classifier in each cohort, inventors classified the genes from the highest to the lowest significant based on a non parametric Mann-Whitney test between pCR and non-pCR groups, and they proceed to a systematic approach by testing the discrimination potential of decreasing sets of genes (from n=43/53 to 3) (FIG. 23). The best prediction rules were obtained with a molecular parameter signature based on 3 genes (HOUSTON FEC LOOCV, p=0.0005; IGGO FEC LOOCV, p=0.002; IGGO TET LOOCV, p=0.43) (FIG. 23). In multivariate analyses using logistic regression, the “Calreticulin” molecular classifiers based on the 3 most significant genes of each cohort were retained as the sole independent prognostic factors for pCR, except for the cohort IGGO TET (negative control) (FIG. 24A). ROC analyses revealed the ability of the 3 genes based—<<Calreticulin>> molecular classifiers to discriminate significantly pCR patients from non-pCR patients, except for the cohort IGGO TET where the predictive value of the model was based only on the pT factor (FIG. 24B). In order to identify the best molecular classifier in common between the two anthracycline treated cohorts, they compared the most discriminant genes between these two cohorts. The classifier was constructed with the 3 candidate genes located in the grey areas (FIG. 25). Univariate analyses based on non-pCR vs pCR contingency tables and multivariate analyses revealed that the common classifier based on the CCR1, EIF2AK2 and DNAJC10 gene expressions (“CALR pathway” signature) was able to predict accurately the response of a human subject having a tumor to anthracyclines (FIG. 26).

[0564] Inventors then attempted to optimize the molecular classifier by integrating host genetic parameters, such as single nucleotide polymorphisms, in the algorithm. Multivariate analyses in HOUSTON FEC cohort revealed that the association of a MTHFR SNP (rs1801133) with the “CALR pathway” signature improved the prediction accuracy of the molecular classifier (FIG. 27). This MTHFR SNP was the most discriminant SNP between pCR and non pCR groups among a set of 384 selected SNPs located in immune candidate genes (Table 1). The interpretation of results revealed in particular that patients carrying the mutated allele of MTHFR SNP (rs1801133) associated with an over-expression of CCR1 and EIF2AK2 genes, and an under-expression of DNAJC10 gene, have higher chance to respond to anthracyclines than patients carrying the wild-type allele of MTHFR SNP associated with an under-expression of CCR1 and EIF2AK2 genes, and an over-expression of DNAJC10. These results demonstrate that tumour parameters, such as gene expression signatures, and host (the subject having a tumor) genetic parameters, such as SNPs, constitutes a powerful combination usable to predict or assess the response of a subject to a treatment of cancer, in particular to anthracyclines.

### Material and Methods:

[0565] Cohort F. André (IGR/Houston) (described in Lancet Oncol. Submitted).

[0566] Patients for gene expression analysis and metagene predictor validation have been selected from a database of 591 patients who received preoperative anthracyclines-based, taxanes-free chemotherapy at the Institut Gustave Roussy between 1987 and 2003. Inclusion criteria consisted of (1) pathologic complete response (pCR) defined as the absence of any invasive cancer or isolated tumor cells in the breast after completion of chemotherapy and (2) availability of frozen, pre-treatment samples in the institutional tumor bank for molecular analysis. Twenty six cases were identified and 26 additional cases were selected as controls. The controls included tumors that were resistant to chemotherapy defined as less than 75% clinical response and residual invasive disease (RD) present at the time of pathologic exam after chemotherapy, and were matched for Endoplasmic Reticulum (ER)-expression. A further double-checking of clinical characteristics revealed that one patient with pCR actually received 2 cycles of docetaxel in addition to 4 courses of FEC (anthracyclines). This patient was retained in the analysis. The study was approved by the local IRB; all patients signed informed consent for tumor banking and future molecular analysis of their tissues.

### Cohort R. Iggo/H. Bonnefoi (Bonnefoi et al, 2007) EORTC

[0567] Breast cancer patients treated in neoadjuvant (before any surgical step) FEC versus TET (anthracyclines versus taxanes) Data basis on tumor profiling (microarrays) described in Lancet Oncol 2007 and available online

[0568] The microarray analyses, such as SVMs (Brown et al., 2000) and non parametric Mann-Whitney test, were performed with the MEV software version 4.5 (Saeed et al., 2006; Saeed et al., 2003). For multivariate logistic regression and ROC (Receiver operating characteristic) analyses, the SPSS 18.0 software was used. The Fisher's exact test was performed with the StatEL software (ad Science, France).

[0569] In clinical databases, when a category of an ordinal variable had too few observations in databases, these observations were pooled with a consecutive category (tumor size T1 and T2, node status N1 and N2 and grade 1 and 2). Missing values for grade, pN and SNPs were assigned to a separate category to avoid a decrease in the sample size in the logistic regression analysis.

### Example 6

### A Single-Nucleotide Polymorphism in Anyone of NLRP4, DDX58, CX3CR1, FAT2, MTHFR Genes Affects the Efficacy of Conventional Anti-Cancer Therapy in a Neoadjuvant Setting (Before Surgery) Breast Cancer Patients

[0570] The inventors observed that the single-nucleotide polymorphism (SNP) A/T Gln925Leu (Q925L-rs302453-SEQ ID NO:60) in NLRP4 gene (NCBI Gene Reference: NM_{—}134444.4)) affects the efficacy of conventional anti-cancer therapy in terms of pathological complete response (pCR) and metastasis free survival in a neoadjuvant setting in breast cancer patients (n=443 and n=441, respectively). Indeed, a meta-analysis combining the results of three studies revealed that the proportion of pathological complete responses was higher in NLRP4-rs302453 mutated group than in wild-type group of patients treated with anthracyclines (20.9% in patients carrying the NLRP4 Gln925Leu mutated allele versus 14.1% in patient with the normal allele; p=0.04 by Chi2 analysis) (FIG. 30A). This association was confirmed by multivariate analyses using logistic regression by taking into account the effects of classical clinical factors. The NLRP4-rs302453 factor appeared independently associated to pathological complete responses (adjusted P-value=0.006, OR=2.14, 95% CI [1.23-3.70]) (FIG. 30B). The meta-analysis combining the results of three survival studies based on univariate and multivariate approaches revealed that the NLRP4-rs302453 was associated with a lower frequency of metastasis in patients carrying the NLRP4 Gln925Leu mutated allele than in patient carrying the normal allele (Log Rank p=0.09, FIG. 31A; Cox model adjusted P-value=0.05, OR=0.69, 95% CI [0.48-1.01], FIG. 31B).

[0571] In other words, the NLRP4 Gln925Leu mutated allele (rs302453) decreases the probability of metastatic relapse in patients treated with anthracyclines.

[0572] Inventors also found that SNPs residing in DDX58/RIG-1 (cytosolic sensor for viral nucleic acids) (A/T-Asp508G1u, D580E-rs17217280-NCBI Gene Reference: NM_{—}014314.3-SEQ ID NO: 17), CX3CR1 (A/G-Thr280Met, T280M-rs3732378-NCBI Gene Reference: NM_{—}001171171.1-SEQ ID NO: 39), genes impact on the prediction in a multivariate Cox model (integrating proliferation index, HER2/HR status) (FIG. 32). Therefore, inventors propose to validate such predictors integrating factors of the host-tumor immune equilibrium (the CRT map pathway and the immune receptors) aimed at predicting therapeutic responses to anthracycline/taxane-based therapies in BC using simple nucleic acid probes on home made chip arrays that we should set up for routine use starting from a tumor biopsy at diagnosis (algorithm presented in FIG. 27).

[0573] The high performance signature found in the neoadjuvant paired cohort (FIG. 33 A) was cross-validated in a second independent neoadjuvant BC cohort (REMAGUS II) containing >260 patients. The FIG. 33 B shows the performance (accuracy and AUC) of signatures of varying length (number of SNPs) trained on the first paired cohort (called <<Houston>>) and tested on REMAGUS II. We observe that the optimal size of the signature is around 5 (instead of 2 for cross-validation estimation (FIG. 33 A)), suggesting that a larger signature may bring additional information. The performance is better for HER2 neg HR+ samples than HER2+ (FIG. 33 B and FIG. 33 C). These data indicate the power of at least 2 associated SNPs those encoding MTHFR(C/T-Ala222Val, A222V-rs1801133-NCBI Gene Reference: NM_{—}005957.4-SEQ ID NO:194) and FAT2 (C/T-Arg574Cys, R574C-rs1432862-SEQ ID NO:162; or T/C-Leu3514Ser, L3514S-rs2053028-SEQ ID NO:216; or G/A-Met363111e, M3631I-rs6650971-SEQ ID NO: 403-NCBI Gene Reference: NM_{—}001447.2), listed in Table 6 and the classical clinical factors to design an accurate model predictive of response to neoadjuvant, anthracycline-based therapy. The mutation of MTHFR and FAT2 brings a selective advantage to respond to therapy.

[0574] In addition, we corroborated the predictive value of DDX58 and FAT2 in a third independent cohort of neoadjuvant breast cancer (BC) as predictive factors of disease free survival (FIG. 33 D).

TABLE 4
(RCH signature)

| | Weigth |
|---|---|
| (Intercept) | −136.84 |
| GREE | 57.35 |
| RH | −16.87 |
| HER2 | −38.35 |
| rs1801133 | 59.68 |
| rs1432862 | −37.37 |

[0575] Two highly significant SNPs in neoadjuvant (MTHFR: rs1801133 and FAT2: rs1432862) in a multivariate Cox model (integrating proliferation index and HR status).

### Material and Methods

### Clinical Study Design

[0576] The inventors retrospectively constructed patient database using data obtained from Institut Gustave Roussy, Villejuif and Centre George François Leclerc, Dijon (France). All patients provided written informed consent for enrollment in the study. Eligible patients had histologically confirmed sporadic breast cancer. All patients received an anthracycline-based chemotherapy before surgery (FEC+taxanes 6 cycles in neoadjuvant setting, HER2+ patients have been excluded). This study was based on the REMAGUS cohort (n=202—patients not treated with Herceptin), the Dijon cohort (n=251) and the Houston case-control cohort (n=58) matched for age, tumor grade and hormone receptors. The primary endpoints of the studies were the pathogical complete response and the metastatic relapse. After generation of the patient database and collection of genomic DNA samples, genotyping and statistical analyses were performed in a blinded fashion. A total of 443 patients fulfilled the inclusion criteria. Chi square test was used to compare the distribution of clinical characteristics across the two genotype groups. All analyses were carried out using SPSS software, version 16 (IBM SPSS Statistics, France).

### Genotyping

[0577] DNA was isolated from frozen blood leukocytes from subjects. The TAQMAN Genotyping assay ID: C_{—}11170747_{—}20 was used to genotype the NLRP4 (rs302453). The TAQMAN Genotyping assay ID: C_{—}25963266_{—}10 was used to genotype the DDX58 (rs17217280). The TAQMAN Genotyping assay ID: C_{—}5687_{—}1 was used to genotype the CX3CR1 (rs3732378). The TAQMAN Genotyping assay ID: C_{—}1202883_{—}20 was used to genotype the MTHFR (rs1801133) The TAQMAN Genotyping assay ID: C_{—}11159313_{—}1 was used to genotype the FAT2 (rs2053028). The TAQMAN Genotyping assay ID: C_{—}25639416_{—}10 was used to genotype the FAT2 (rs6650971). The TAQMAN Genotyping assay ID: C_{—}8949947_{—}20 was used to genotype the FAT2 (rs1432862) Briefly, 10 ng of genomic DNA was mixed with 5 μL of 2× TaqMan Genotyping Master Mix (Applied Biosystems) and 0.25 μL of 40× genotyping assay in a final volume of 10 μL. Temperature cycling and real time fluorescence measurement were done using an StepOnePlus System (Applied Biosystems). The genotypes were assigned to each subject, by comparing the signals from the two fluorescent probes, FAM and VIC, and calculating the −log(FAM/VIC) ratio for each data point with the StepOne software v2.0(Applied Biosystems).

### Cohort REMAGUS:

[0578] Breast cancer patients (n=202) treated in neoadjuvant (before any surgical step).

### Cohort Dascier:

[0579] Paired study of 35 responders and 35 non responders, the pairing being made on all clinical prognostic factors for Breast Cancer (BC).

### Example 7

### Tumor Cells Undergoing Immunogenic Cell Death after Chemotherapy are Characterized by a Viral Gene Signature-Like

### First Evidences

[0580] Gene microarray analyses have been performed on Tumor cells harvested from mice which have been treated by either PBS or Doxorubicin, 2 days before. About 30 gene expressions have been identified to increase up to 4 fold change upon doxorubicin treatment (Table 3). All these genes are involved in viral recognition and/or Interferon pathway and/or immune functions.

TABLE 3
Candidate genes list identified by Microarray analysis.

| Official | Day 2 Fold | | | | |
|---|---|---|---|---|---|
| symbol | change | Official name | Common name | Gene ID (Human) | Gene ID (Mice) |
| Rsad2 | 4.07 | radical S-adenosyl methionine domain | Viperin | 91543 | 58185 |
| | | containing 2 | | | |
| Cxcl10 | 3.27 | | | 3627 | 15945 |
| Ccl4 | 3.15 | | | 6351 | 20303 |
| Irf7 | 3.03 | interferon regulatory factor 7 | | 3665 | 54123 |
| Il15 | 2.98 | | | 3600 | 16168 |
| Ifit2 | 2.89 | interferon-induced protein with | IFIT-2, GARG- | 3433 | 15958 |
| | | tetratricopeptide repeats 2 | 39, IFI-54K | | |
| Dhx58 | 2.87 | RNA helicase LGP2, probable ATP- | LGP2 | 79132 | 80861 |
| | | dependent RNA helicase DHX58, RIG-I- | | SEQ ID NO: 528 | SEQ ID NO: 529 |
| | | like receptor | | | |
| Ifi205 | 2.61 | interferon-inducible protein p205-A | p205 | | 226695 |
| Trim30 | 2.54 | tripartite motif-containing protein 30 | Trim30A | | 20128 |
| Cd274 | 2.31 | | PD-L1 | | |
| Cd69 | 1.96 | | CD69 | | |
| Ly6c1 | 1.94 | | Ly6C | | |
| Cxcl1 | 1.93 | | Cxcl1 | 2919 | 14825 |
| Ifnb1 | 1.87 | | Ifnb1 | 3456 | 15977 |
| Ccl7 | 1.81 | | Ccl7 | 6354 | 20306 |
| Ccl2 | 1.66 | | Ccl2 | 158105 | 20296 |
| Ccl3 | 1.27 | | Ccl3 | 6348 | 20302 |
| Tnfrsf9 | 1.42 | | 4-1BB | | |
| Irf3 | 1.05 | | Irf3 | 3661 | 54131 |
| Oasl1 | 3.21 | | | | 231655 |
| Oas2 | 3.08 | | | 4939 | 246728 |
| Mx2 | 2.53 | | | 4600 | 17858 |
| Mx1 | 1.68 | | | 4599 | 17857 |
| stat4 | 1.04 | | | | |
| Mavs | ND | mitochondrial antiviral signaling protein | MAVS, IPS-1, | 57506 | 228607 |
| | | | CARDIFF | | |
| Irf1 | ND | | | 3659 | 16362 |
| Stat3 | ND | | | | |
| Ccl5 | ND | | | 6352 | 20304 |
| Cxcl9 | ND | | | 4283 | 17329 |
| Ly6g | ND | | | | |
| Cxcl2 | ND | | | 2920 | 20310 |
| Tnf | ND | | | 7124 | 21926 |
| Il12 | ND | | | 3592 | 16159 |
| Ppia | | | | 5478 | 268373 |
| Cdl1c | ND | | | | |
| Cdl1b | ND | | | | |

[0581] Then inventors confirm by Real Time PCR the data provided by micro-array analysis.

### Results

[0582] We confirmed by RT-PCR that genes involved in viral recognition and in anti-viral immune responses are specifically up-regulated 2 days after doxorubicin treatment (FIG. 35).

[0583] We confirmed that these genes are up-regulated day 2 after chemotherapy: Rsad2, Dhx58, Ifi205, Trim30, Mx1, Oas2, Mx2, Ifit2, I115, Irf7, Ifnb1, Cxcl1, Cxcl10, Ccl2, Ccl3, Ccl4, Ccl7 and I112a while Mavs, Irf3, Irf1 and Tnf were unchanged.

[0584] These genes are expressed majorly in CD45+ fraction: Rasd2, Ifi205, Mx1, Ifnb1, Ifit2, I115, Irf7, Ccl4, Ccl7, Ccl3, Tnf, I112a.

[0585] Both CD45+ and CD45− fractions contribute to Irf1, Irf3, Ccl2, Cxcl1, Cxcl10, Dhx58, Mavs expression.

### Conclusion

[0586] Doxorubicin-induced Immunogenic Cell Death is characterized by a viral gene signature-like triggering. These genes probably highlight the crucial pathway that allows a reactivation and/or de novo generation of a potent anti-tumor immune response which is indispensable for therapeutic success. Thus, this viral gene signature like appears as a potent predictor for immunogenic tumor cell death and probably for the response to chemotherapy and therapeutic success.

### Material and Method

### Experimental Setting: (FIG. 34)

[0587] Tumor Cells, Chemotherapy Treatment.

[0588] 0.8 Million of MCA 205 has been subcutaneously implanted to C57Bl6 mice. When tumors reached 36 to 42 mm² (about 7 days later), mice have been intratumoraly treated by either PBS or Doxorubicin (Doxo) (2 mM, 50 μl). (4 groups: PBS or Doxo Treated, Day 2 or Day 8 post treatment, 6 mice/group).

[0589] RNA Extraction, Reverse Transcription into cDNA and Quantitative RT-PCR Analysis of Gene Expression.

[0590] Tumor samples were freshly collected, briefly washed in RPMI1640 media (GIBCO). Tissue samples were cut to a maximum thickness in any one dimension of 0.5 cm, placed in 5 volumes of RNAlater® (SIGMA ALDRICH). Samples can be stored at room temperature if processed for RNA extraction on the same day or stored at 4° C. for less than 1 month. RNA extraction from each tumor (up to 30 mg/sample) was performed using RNeasy Mini Kit (QIAGEN) following the instructions.

[0591] RNA concentration and purity was tested by NanoDrop Spectrophotometers (Thermo Scientific). Reverse transcription: mRNA (containing 2.5-5 μg RNA in 30 ul RNase and DNase free water) was incubated at 65° C. 10 min, then placed on ice for 2 min.

[0592] Add 20 μl of Master mix (dN6 (3 ng/μl), dNTP (1 mM), Buffer (1×), RNAsin (40 U) Superscript® III RT (200 U)) into the processed mRNA sample. Mix was incubated at 50° C. for 1 h and then inactivated at 75° C. for 15 min.

[0593] qRT-PCR.

[0594] cDNA of each sample was diluted at 1:3 with DNase free water. For each sample, 4 μl of primer and probe TAQMAN (2×), 10 μL1 of assay mix (20×), 5 μl diluted cDNA were added. qRT-PCR was performed (45 cycles with standard PCR program using StepOnePlus™ system (Applied Biosystems). PPIA was used as endogenous control gene to normalize gene expression for data analysis.

### Example 8

### Anti-Calreticulin Antibody Response is a Predictive and Prognostic Factor for the Clinical Response to Anthracyclines and Metastasis-Free Survival in Breast Cancer Patients

### Material and Methods

[0595] IgA and IgG anti-calreticulin antibody levels before and after chemotherapy by anthracyclines were analyzed in 107 sera from a cohort of neo-adjuvant breast cancer patients. Each value represents the arithmetical average of 4 different assays. Two different dilutions of sera were used: 1/20 and 1/100 in case of IgA antibodies and 1/100 and 1/500 in case of IgG anti-calreticulin antibodies. Each serum sample and standard serum were analysed in triplicate. The highest optical density (OD) of negative controls was subtracted from the mean of OD measured.

[0596] The mixture of the sera of patients (suffering from active celiac disease, refractory celiac sprue, autoimmune hepatitis type I, primary hepatocellular carcinoma, pancreatic adenocarcinoma and gall-bladder adenocarcinoma) with various seropositivity for anti-calreticulin antibodies was used as a standard. There were differences among antigenic epitopes of CRT recognized by IgA and IgG antibodies (previously tested by Pepscan) in these serum samples.

[0597] Determination of serum levels of antibodies against calreticulin: An enzyme-linked immunosorbent assay (ELISA) for testing the serum levels of IgA and IgG anti-calreticulin antibodies was performed as described in previous studies [Sanchez et al., 2008, 2003]. Briefly, human recombinant calreticulin used in a final concentration of 5 mg/ml of phosphate-buffered saline (PBS) was coated on 96-well polystyrene plates (Gama, Czech Republic) overnight at 4° C. Blocking buffer [1% bovine serum albumin (BSA) in PBS; Sigma, Germany] was used as a negative control. Each serum sample and standard serum were diluted in blocking buffer.

[0598] Serum levels of anti-calreticulin antibodies were expressed as arbitrary units (AU), the optical density of an internal standard serum being used as reference (i.e. taken as 100%). The cut-off value for anti-calreticulin antibodies was calculated as the mean value plus two standard deviations from the data pool of the 75 control sera samples. Cut-off values—calculated as the mean value plus two standard deviations from the data pool of the 75 control sera samples—are 60 AU for IgA anti-CRT antibodies and 90 AU for IgG anti-calreticulin antibodies. Values exceeding the cut-off were considered as positive. The non parametric Mann-Whitney U test was used for statistical analysis.

### Results

[0599] The levels of anti-calreticulin antibodies in breast cancer cohort reach 47.7±23.8 (mean±standard deviation) for IgA and 83.8±40 AU for IgG isotope. The levels of anti-calreticulin antibodies in healthy volunteers group was 32.4±13.8 for IgA and 52.9±18.7 AU for IgG isotope (p<0.001) (FIG. 36).

[0600] The fractions of your sera for anti-calreticulin antibodies are: 27/107 vs 4/75 for IgA and 37/107 vs 7/75 for IgG antibodies in Breast Cancer patient vs Healthy volunteers, respectively (FIG. 37).

[0601] For 9 patients, inventors were able to study samples at diagnosis and after chemotherapy. Despite the few number of patients, it appears that a negative serology at the diagnosis and a sero-conversion during the treatment course are associated to a good prognosis.

[0602] For example the patient 6, who responded to the treatment and didn't relapse was seronegative at the diagnosis and then develop a humoral response against Calreticulin (FIG. 38, left panel). Conversely, the patient 4 who didn't respond to the treatment and relapsed was sero-negative at the diagnosis and failed to acquire anti-Calreticulin antibody under chemotherapy. (FIG. 38, right panel).

### Conclusion

[0603] The level of 1 g anti-Calreticulin at diagnosis and the dynamic acquisition of such antibody during the treatment course are directly correlated to the response to anthracycline chemotherapy and metastasis free survival in Breast Cancer patients.

### Example 9

### Autophagy is Required for the Immunogenicity of Cell Death and is Triggered by Anthracyclines and Oxaliplatine

[0604] The outcome of chemotherapy can be influenced by the host immune system at multiple levels. Inventors working hypothesis that chemotherapy can kill cancer cells in a way that they elicit an immune response is herein examined. They have accumulated data indicating that the history of pre mortem stress—including endoplasmic reticulum (ER) stress and autophagy—determines whether cell death is perceived by the immune system as immunogenic, causing the engulfment, processing and presentation of tumour antigens by antigen-presenting cells, followed by a cellular anticancer immune response that increases the efficacy of anticancer chemotherapies (Casares et al. JEM 2005, Obeid et al., Nat Med 2006, Apetoh et al. Nat Med 2007, Ghiringhelli et al. Nat. Med. 2009, Zitvogel et al. Nat Rev Immunol 2008). Inventors found that ER stress can culminate in the translocation of an ER protein, calreticulin, to the cell surface where it serves as an engulfment signal for dendritic cells (DC).

[0605] Surrogate markers of an ongoing ER stress response can be studied in immunohistochemistry (1HC) using specific antibodies recognizing phosphorylated eif2alpha, calreticulin, ERp57, HMGB1 on initial breast cancer core biopsies (paraffin embedded tissues or frozen specimen). Typical stainings for phosphorylated eif2alpha and HMGB1 are showing in FIG. 39 A. The staining of CRT is cytosolic, quoted positive or negative (intensity of staining is not important for the scoring), more than half of BC being negative at diagnosis. The staining of ERp57 is positive when ERp57 is at the plasma membrane (since most BC are positive, only ⅛ BC present with a relocation of cytosolic ERp57 to plasma membrane). The staining of HMGB1 should be inverted, meaning that the nuclei should become negative while the cytosol should become highly positive including those where there is a perinuclear reenforcement of the staining. Phosphorylated eif2a is a cytosolic staining which should be quite homogeneous and intense to be quoted positive (about ⅔ of specimen). Each IHC criteria counting for 1, the maximum score of a given tumor specimen is 4 while the minimal score is 0. In responders (patients whose tumor exhibits a pathological complete response post chemotherapy), ⅔ of tumors at diagnosis presented with a score >2 while in non responders, ⅓ of tumors at diagnosis presented with a score >2 (FIG. 39 B). Moreover, inventors unpublished data indicate that pre mortem autophagy is required for dying cells to release ATP, which acts on purinergic receptors to stimulate DC for optimal tumour antigen presentation. Thus, pre-apoptotic ER stress and autophagy determine the emission of immunogenic signals—CRT exposure and ATP secretion—as tumour cells die.

[0606] As a result, inventors herein identify the anticancer cytotoxic agents which are particularly efficient in inducing ER stress and autophagy, and demonstrate (i) that a mechanistic and perhaps hierarchical relationship between ER stress and autophagy exists, (ii) that cytotoxic agents inducing ER stress plus autophagy always induce immunogenic cell death in vivo, and (iii) that compensatory therapies can be developed to overcome defects in immunogenic cell death at the level of ER stress or autophagy.

[0607] Inventors also describe the analysis of clinical samples from patients with neaoadjuvant treated breast cancers or adjuvant colorectal carcinoma (CRC), and determine the impact of ER stress and autophagy on chemotherapeutic responses or prognosis thereby validating their working hypothesis that ER stress and autophagy play a decisive role in eliciting anticancer immune responses and in improving the efficacy of antineoplastic therapies.

[0608] As mentioned above, CRT exposure and ATP release constitute obligatory immunogenic signals. Without CRT exposure or without ATP release, tumour cell death is detected as non-immunogenic. This means that chemotherapeutic agents that fail to induce CRT exposure or ATP release cannot induce immunogenic cell death. Moreover, tumour cells that have lost their capacity to expose CRT on the surface or to secrete ATP from tumours become refractory to therapy with normally immunogenic cell death inducers such as anthracyclines (Kepp, Cancer Met Rev, 2011, Martins I, Oncogene 2010, Martins I, Ann NY Acad Med 2010). Inventors report that CRT exposure critically relies on an ER stress response that is usually triggered by immunogenic cell death inducers such as anthracyclines. Accordingly, they found that the stable knockdown of PERK, a kinase involved in the ER stress response, abolished CRT exposure and the immunogenicity of anthracycline-induced cell death. In an attempt to restore this defect, they screened the IBBC library of bioactive compounds to identify agents that can restore CRT exposure. Inventors found that thapsigargin (example 3), an inhibitor of the SERCA pump and a prototypic ER stress inducer, was the sole agent (out of 450 compounds) to induce CRT exposure in the presence of cisplatin but not in the absence of cisplatin. Indeed, thapsigargin and another ER stressor, tunicamycin, could induce immunogenic cell death when combined with cisplatin, underscoring the importance of ER stress for the induction of immunogenic cell death (Martins I et al, Oncogene 2010).

[0609] Inventors unpublished data also indicate that macroautophagy (“autophagy”) is surprisingly required for ATP release. Intracellular ATP can be quantified with quinacrine, which accumulates in ATP-rich intracellular structures and then emits a green fluorescence, even after aldehyde fixation of the cells. This signal can be detected by fluorescence microscopy or flow cytometry. Only those chemotherapeutic agents that cause pre-lethal autophagy can induce ATP release, and autophagy-deficient tumour cells fail to release ATP after blockade of the autophagic pathway by knockdown of essential autophagy (Atg 5, 6, 7, 12) genes (FIG. 40). Inventors can visualize autophagy in chemotherapy treated mouse tumors in vivo using LC3-GFP engineered CT26 or MCA205 where microtubule-associated protein 1 light chain 3 alpha (LC3) can be observed in frozen tissues in immunofluorescence (FIG. 41). Autophagy may be assessed using the following parameters: a mixture Ab targeting LC3 and gate 16/GABARAP members.

[0610] Importantly, such autophagy-deficient tumour cells fail to immunize against live tumour cells when they are treated with anthracylines in vitro and injected subcutaneously into immunocompetent mice, in conditions in which normal (autophagy-competent) dying tumour cells are immunogenic (FIG. 42). This defect in immunogenicity can be restored by elevating the extracellular ATP concentration, namely by co-injection of the ecto-ATPase (apyrase) inhibitor ARL67156 (FIG. 43).

[0611] Moreover, autophagy-deficient tumours which have been established for 8 days (implanted in mice eight days before injection of chemotherapy) fail to respond to anthracycline-based chemotherapy in vivo, and this defect is again overcome by intratumoural injections of ARL67156 (FIG. 44). These data underscore the importance of ER stress and autophagy for rendering cell death immunogenic and hence for enhancing anticancer immune responses in vivo. A preliminary screen on 2000 anticancer agents indicates that only a minority can induce both autophagy and ER stress, suggesting that only a few are endowed with the capacity to induce immunogenic cell death.

### Material and Methods

[0612] FIG. 38. The Core Machinery of Autophagy is Indispensable for ATP Release During Exposure with Immunogenic Chemotherapies.

[0613] FIG. 38 upper panel. Mouse embryonic fibroblasts (MEF) genetically modified by small interfering RNA blocking the expression of ATG5 have been exposed ex vivo for 48 hours with increasing dosing of oxaliplatin (OX) or mitoxanthrone (an anthracycline, MX). The percentages of Quinacrine negative cells, assessed by immunofluorescence (GFP emission) represent the proportions of cells that have lost intracellular ATP. The positive control for autophagy induction is starvation.

[0614] FIG. 38 lower panel. Mouse colon cancer CT26 have been knock down for the expression of several family members of the core machinery of autophagy (by means of small interfering RNA, two different specific siRNA for ATG5, 6 or 7 and control siRNA (siSC)) and then subjected to ex vivo exposure with mitoxanthrone (MX) or control saline (CT). ATP release is indirectly measured by the percentages of cancer cells that have lost quinacrine expression.

### FIG. 39. Induction of Autophagy In Vivo Following Chemotherapy of Established Tumors.

[0615] After 8 days of tumor implantation (CT26 mouse colon cancer genetically modified to overexpress LC3-GFP in BALB/c immunocompetent mice), oxaliplatin or mitoxanthrone was inoculated systemically (i.v.). Tumors were withdrawn at 48 hours post-therapy and immunofluorescence stainings were performed on frozen sections of tumor tissues to visualize nuclei (in Hoechst blue), and autophagosomes in green (LC3-GFP). Redistribution of LC3-GFP in autophagosomes can be visualized post-therapy with both cytotoxic agents (mitoxanthrone MTX and oxaliplatin) as shown in representative micrograph pictures (upper panels). The lower panel is a graph summarizing enumeration of autophagosomes positive cells in 10 independent sections per tumor and animal (each dot represents one tumor). Statistical analyses were performed with Anova test (Fisher's exact method) with significant results at p<0.05.

FIG. 40. Prophylactic Immunization with Dying Tumor Cells is Impaired when Dying Cells are Autophagy-Deficient.

[0616] One million CT26 knock down with small interfering RNA specific for ATG5, ATG6 (Beclin 1 BCN1), or ATG7 or controls siCO were treated with the anthracyclin mitoxanthrone (MTX) for 18 hours, washed and inoculated in one flank of a naïve animal (BALB/C mouse). Positive controls are CT26 treated with MTX and negative controls are CT26 treated with PBS. Ten days later, mice were rechallenged with 3× the minimal tumorigenic dose of live CT26 cells on the opposite flank and monitoring of tumor growth was recorded with a caliper (product of perpendicular diameters). The % of tumor free animals are shown in the graph and the number of animals per group is indicated (n=20). Statistical analyses were performed with Anova test (Fisher's exact method) with significant results at p<0.05.

### FIG. 41. Compensatory Therapy for Autophagy Deficient Cells: Apyrase Inhibitors Restore the Immunogenicity of Autophagy-Deficient Dying Tumor Cells.

[0617] Idem as in FIG. 40 but the dying cells (siCO or siATG7) were admixed (or not) with apyrase inhibitors (AI) (apyrases are enzymes hydrolyzing ATP in the extracellular milieu) and/or suramine (SUR) or oxidized ATP (OXY), both inhibitors of purinergic receptors at the conventional dosing (previously reported). The % of tumor free animals are shown in the graph and the number of animals per group is indicated (n=20). Statistical analyses were performed with Anova test (Fisher's exact method) with significant results at p<0.05.

FIG. 42. Autophagy-Deficient Tumors Failed to Properly Respond to Chemotherapy Unless Apyrase Inhibitors are Coadministered Along with Chemotherapy.

[0618] One million CT26 knock down with small interfering RNA specific for ATG5 or ATG7 or controls WT were treated with the anthracyclin mitoxanthrone (MTX) at 8 days post-implantation in one flank of a naïve animal (BALB/C mouse). The lower graphs indicate that the growth of ATG5 and ATG7 deficient tumors are not controlled by MTX therapy in contrast to CT26 WT which significantly respond to anthracyclines. However, the upper graphs show that when apyrase inhibitors (AI) are co-administered locally in tumor beds along with chemotherapy (i.v. inoculated), tumors start to regress with the cytotoxic agent. Monitoring of tumor growth was recorded with a caliper (product of perpendicular diameters) and is depicted for 5 mice/group. Statistical analyses were performed with Anova test (Fisher's exact method) with significant results at p<0.05.

### Example 10

### Compensatory Therapy Using TLR4 and 4-1BB Agonists

### Material and Method

### TLR4Agonist:

[0619] MCA205 or EL4 tumor cell lines were subcutaneously implanted to C57Bl6 mice. Seven days later, MCA 205 or EL4 tumor bearing mice were treated by either PBS or chemotherapy (Doxorubicin intra tumoral (i.t.) or Oxaliplatin intra peritoneal (i.p.) respectively). At day 3 and 5 post chemotherapy, some mice were treated i.t with 2 μg of Dendrophilin, a TLR4 agonist.

[0620] 4-1BB Agonist:

[0621] MCA205 or EL4 tumor cell lines were subcutaneously implanted to C57Bl6 mice. Seven days later, MCA 205 or EL4 tumor bearing mice were treated by with either PBS or chemotherapy (Doxorubicin i.t. or Oxaliplatin i.p respectively).

[0622] At day 3, 6 and 9 post chemotherapy, some mice were treated i.p. with 100 μg of 4-1BB agonist.

### Results

[0623] PBS treated mice cannot control the tumor growth whereas chemotherapy-treated mice are able to do so. Dendrophilin combined with Chemotherapy increases the control of the tumor growth, meaning that TLR4 agonists potentiate the immunogenicity of anthracyclines and oxaliplatin in 2 tumor models (FIG. 45)

[0624] PBS treated mice cannot control the tumor growth whereas chemotherapy-treated mice are able to do so. 4-1BB agonist combined with Chemotherapy increases the control of the tumor growth, meaning that 4-1BB agonists potentiate the immunogenicity of anthracyclines and oxaliplatin in 2 tumor models (FIG. 46).

### REFERENCES

[0625] Apetoh, L., F. Ghiringhelli, A. Tesniere, M. Obeid, C. Ortiz, A. Criollo, G. Mignot, M. C. Maiuri, E. Ullrich, P. Saulnier, H. Yang, S. Amigorena, B. Ryffel, F. J. Barrat, P. Saftig, F. Levi, R. Lidereau, C. Nogues, J. P. Mira, A. Chompret, V. Joulin, F. Clavel-Chapelon, J. Bourhis, F. Andre, S. Delaloge, T. Tursz, G. Kroemer, and L. Zitvogel. 2007. Toll-like receptor 4-dependent contribution of the immune system to anticancer chemotherapy and radiotherapy. Nat Med 13:1050-1059.
[0626] Boucontet, L., N. Sepulveda, J. Carneiro, and P. Pereira. 2005. Mechanisms controlling termination of V-J recombination at the TCRgamma locus: implications for allelic and isotypic exclusion of TCRgamma chains. J Immunol 174:3912-3919.
[0627] Casares, N., M. O. Pequignot, A. Tesniere, F. Ghiringhelli, S. Roux, N. Chaput, E. Schmitt, A. Hamai, S. Hervas-Stubbs, M. Obeid, F. Coutant, D. Metivier, E. Pichard, P. Aucouturier, G. Pierron, C. Garrido, L. Zitvogel, and G. Kroemer. 2005. Caspase-dependent immunogenicity of doxorubicin-induced tumor cell death. J Exp Med 202:1691-1701.
[0628] Dechanet, J., P. Merville, A. Lim, C. Retiere, V. Pitard, X. Lafarge, S. Michelson, C. Meric, M. M. Hallet, P. Kourilsky, L. Potaux, M. Bonneville, and J. F. Moreau. 1999. Implication of gammadelta T cells in the human immune response to cytomegalovirus. J Clin Invest 103:1437-1449.
[0629] Do, J. S., P. J. Fink, L L1, R. Spolski, J. Robinson, W. J. Leonard, J. J. Letterio, and B. Min. Cutting Edge: Spontaneous Development of IL-17-Producing {gamma} {delta} T Cells in the Thymus Occurs via a TGF-{beta}1-Dependent Mechanism. J Immunol
[0630] Doisne, J. M., C. Becourt, L. Amniai, N. Duarte, J. B. Le Luduec, G. Eberl, and K. Benlagha. 2009. Skin and peripheral lymph node invariant NKT cells are mainly retinoic acid receptor-related orphan receptor (gamma)t+ and respond preferentially under inflammatory conditions. J Immunol 183:2142-2149.
[0631] Ghiringhelli, F., L. Apetoh, A. Tesniere, L. Aymeric, Y. Ma, C. Ortiz, K. Vermaelen, T. Panaretakis, G. Mignot, E. Ullrich, J. L. Perfettini, F. Schlemmer, E. Tasdemir, M. Uhl, P. Genin, A. Civas, B. Ryffel, J. Kanellopoulos, J. Tschopp, F. Andre, R. Lidereau, N. M. McLaughlin, N. M. Haynes, M. J. Smyth, G. Kroemer, and L. Zitvogel. 2009. Activation of the NLRP3 inflammasome in dendritic cells induces IL-1beta-dependent adaptive immunity against tumors. Nat Med 15:1170-1178.
[0632] Godfrey, D. I., D. G. Pellicci, O. Patel, L. Kjer-Nielsen, J. McCluskey, and J. Rossjohn. 2009. Antigen recognition by CD1d-restricted NKT T cell receptors. Semin Immunol
[0633] Hamada, S., M. Umemura, T. Shiono, K. Tanaka, A. Yahagi, M. D. Begum, K. Oshiro, Y. Okamoto, H. Watanabe, K. Kawakami, C. Roark, W. K. Born, R. O'Brien, K. Ikuta, H. Ishikawa, S, Nakae, Y. Iwakura, T. Ohta, and G. Matsuzaki. 2008. IL-17A produced by gammadelta T cells plays a critical role in innate immunity against listeria monocytogenes infection in the liver. J Immunol 181:3456-3463.
[0634] Hinrichs, C. S., A. Kaiser, C. M. Paulos, L. Cassard, L. Sanchez-Perez, B. Heemskerk, C. Wrzesinski, Z. A. Borman, P. Muranski, and N. P. Restifo. 2009. Type 17 CD8+ T cells display enhanced antitumor immunity. Blood 114:596-599.
[0635] Ivanov, I I, B. S. McKenzie, L. Zhou, C. E. Tadokoro, A. Lepelley, J. J. Lafaille, D. J. Cua, and D. R. Littman. 2006. The orphan nuclear receptor RORgammat directs the differentiation program of proinflammatory IL-17+ T helper cells. Cell 126:1121-1133.
[0636] Jensen, K. D., X. Su, S. Shin, L. L1, S. Youssef, S. Yamasaki, L. Steinman, T. Saito, R. M. Locksley, M. M. Davis, N. Baumgarth, and Y. H. Chien. 2008. Thymic selection determines gammadelta T cell effector fate: antigen-naive cells make interleukin-17 and antigen-experienced cells make interferon gamma. Immunity 29:90-100.
[0637] Kabelitz, D., D. Wesch, and W. He. 2007. Perspectives of gammadelta T cells in tumor immunology. Cancer Res 67:5-8.
[0638] Kim, S. H., E. C. Henry, D. K. Kim, Y. H. Kim, K. J. Shin, M. S. Han, T. G. Lee, J. K. Kang, T. A. Gasiewicz, S. H. Ryu, and P. G. Suh. 2006. Novel compound 2-methyl-2H-pyrazole-3-carboxylic acid (2-methyl-4-o-tolylazo-phenyl)-amide (CH-223191) prevents 2,3,7,8-TCDD-induced toxicity by antagonizing the aryl hydrocarbon receptor. Mol Pharmacol 69:1871-1878.
[0639] Kortylewski, M., H. Xin, M. Kujawski, H. Lee, Y. Liu, T. Harris, C. Drake, D. Pardoll, and H. Yu. 2009. Regulation of the IL-23 and IL-12 balance by Stat3 signaling in the tumor microenvironment. Cancer Cell 15:114-123.
[0640] Kryczek, I., M. Banerjee, P. Cheng, L. Vatan, W. Szeliga, S. Wei, E. Huang, E. Finlayson, D. Simeone, T. H. Welling, A. Chang, G. Coukos, R. Liu, and W. Zou. 2009. Phenotype, distribution, generation, and functional and clinical relevance of Th17 cells in the human tumor environments. Blood 114:1141-1149.
[0641] Lockhart, E., A. M. Green, and J. L. Flynn. 2006. IL-17 production is dominated by gammadelta T cells rather than CD4 T cells during Mycobacterium tuberculosis infection. J Immunol 177:4662-4669.
[0642] Martin-Orozco, N., P. Muranski, Y. Chung, X. O. Yang, T. Yamazaki, S. Lu, P. Hwu, N. P. Restifo, W. W. Overwijk, and C. Dong. 2009. T helper 17 cells promote cytotoxic T cell activation in tumor immunity. Immunity 31:787-798.
[0643] Martin, B., K. Hirota, D. J. Cua, B. Stockinger, and M. Veldhoen. 2009. Interleukin-17-producing gammadelta T cells selectively expand in response to pathogen products and environmental signals. Immunity 31:321-330.
[0644] Mills, K. H. 2008. Induction, function and regulation of IL-17-producing T cells. Eur J Immunol 38:2636-2649.
[0645] O'Brien, R. L., C. L. Roark, and W. K. Born. 2009. IL-17-producing gammadelta T cells. Eur J Immunol 39:662-666.
[0646] Obeid, M., A. Tesniere, F. Ghiringhelli, G. M. Fimia, L. Apetoh, J. L. Perfettini, M. Castedo, G. Mignot, T. Panaretakis, N. Casares, D. Metivier, N. Larochette, P. van Endert, F. Ciccosanti, M. Piacentini, L. Zitvogel, and G. Kroemer. 2007. Calreticulin exposure dictates the immunogenicity of cancer cell death. Nat Med 13:54-61.
[0647] Panaretakis, T., N. Joza, N. Modjtahedi, A. Tesniere, I. Vitale, M. Durchschlag, G. M. Fimia, O. Kepp, M. Piacentini, K. U. Froehlich, P. van Endert, L. Zitvogel, F. Madeo, and G. Kroemer. 2008. The co-translocation of ERp57 and calreticulin determines the immunogenicity of cell death. Cell Death Differ 15:1499-1509.
[0648] Panaretakis, T., O. Kepp, U. Brockmeier, A. Tesniere, A. C. Bjorklund, D. C. Chapman, M. Durchschlag, N. Joza, G. Pierron, P. van Endert, J. Yuan, L. Zitvogel, F. Madeo, D. B. Williams, and G. Kroemer. 2009. Mechanisms of pre-apoptotic calreticulin exposure in immunogenic cell death. Embo J 28:578-590.
[0649] Peng, G., H. Y. Wang, W. Peng, Y. Kiniwa, K. H. Seo, and R. F. Wang. 2007. Tumor-infiltrating gammadelta T cells suppress T and dendritic cell function via mechanisms controlled by a unique toll-like receptor signaling pathway. Immunity 27:334-348.
[0650] Pichavant, M., S. Goya, E. H. Meyer, R. A. Johnston, H. Y. Kim, P. Matangkasombut, M. Zhu, Y. Iwakura, P. B. Savage, R. H. DeKruyff, S. A. Shore, and D. T. Umetsu. 2008. Ozone exposure in a mouse model induces airway hyperreactivity that requires the presence of natural killer T cells and IL-17. J Exp Med 205:385-393.
[0651] Rachitskaya, A. V., A. M. Hansen, R. Horai, Z. L1, R. Villasmil, D. Luger, R. B. Nussenblatt, and R. R. Caspi. 2008. Cutting edge: NKT cells constitutively express IL-23 receptor and RORgammat and rapidly produce IL-17 upon receptor ligation in an IL-6-independent fashion. J Immunol 180:5167-5171.
[0652] Reboldi, A., C. Coisne, D. Baumjohann, F. Benvenuto, D. Bottinelli, S. Lira, A. Uccelli, A. Lanzavecchia, B. Engelhardt, and F. Sallusto. 2009. C—C chemokine receptor 6-regulated entry of TH-17 cells into the CNS through the choroid plexus is required for the initiation of EAE. Nat Immunol 10:514-523.
[0653] Shibata, K., H. Yamada, H. Hara, K. Kishihara, and Y. Yoshikai. 2007. Resident Vdelta1+ gammadelta T cells control early infiltration of neutrophils after Escherichia coli infection via IL-17 production. J Immunol 178:4466-4472.
[0654] Sunaga, S., K. Maki, Y. Komagata, J. Miyazaki, and K. Ikuta. 1997. Developmentally ordered V-J recombination in mouse T cell receptor gamma locus is not perturbed by targeted deletion of the Vgamma4 gene. J Immunol 158:4223-4228.
[0655] Sutton, C. E., S. J. Lalor, C. M. Sweeney, C. F. Brereton, E. C. Lavelle, and K. H. Mills 2009. Interleukin-1 and IL-23 induce innate IL-17 production from gammadelta T cells, amplifying Th17 responses and autoimmunity. Immunity 31:331-341.
[0656] Umemura, M., A. Yahagi, S. Hamada, M. D. Begum, H. Watanabe, K. Kawakami, T. Suda, K. Sudo, S, Nakae, Y. Iwakura, and G. Matsuzaki. 2007. IL-17-mediated regulation of innate and acquired immune response against pulmonary Mycobacterium bovis bacille Calmette-Guerin infection. J Immunol 178:3786-3796.
[0657] Veldhoen, M., K. Hirota, A. M. Westendorf, J. Buer, L. Dumoutier, J. C. Renauld, and B. Stockinger. 2008. The aryl hydrocarbon receptor links TH17-cell-mediated autoimmunity to environmental toxins. Nature 453:106-109.
[0658] Wang, L., T. Yi, M. Kortylewski, D. M. Pardoll, D. Zeng, and H. Yu. 2009. IL-17 can promote tumor growth through an IL-6-Stat3 signaling pathway. J Exp Med 206:1457-1464.
[0659] Zitvogel, L., L. Apetoh, F. Ghiringhelli, F. Andre, A. Tesniere, and G. Kroemer. 2008. The anticancer immune response: indispensable for therapeutic success? J Clin Invest 118:1991-2001.
[0660] Zitvogel, L., Casares, N., Pequignot, M., Albert, M. L. & Kroemer, G. Adv. Immunol. 84, 131-79 (2004)
[0661] Steinman, R. M. & Mellman, I. Science 305, 197-200 (2004)
[0662] Lake, R. A. & van der Most, R. G. N Engl J Med 354, 2503-4 (2006).
[0663] Zitvogel, L., Tesniere, A. & Kroemer, G. Nat Rev Immunol in press (2006)
[0664] Apetoh L, Ghiringhelli F, Tesniere A, Criollo A, Ortiz C, Lidereau R et al (2007). The interaction between HMGB1 and TLR4 dictates the outcome of anticancer chemotherapy and radiotherapy. Immunol Rev 220: 47-59.
[0665] Garg A D, Nowis D, Golab J, Vandenabeele P, Krysko D V, Agostinis P (2009). Immunogenic cell death, DAMPs and anticancer therapeutics: An emerging amalgamation. Biochim Biophys Acta.
[0666] Gourdier I, Crabbe L, Andreau K, Pau B, Kroemer G (2004). Oxaliplatin-induced mitochondrial apoptotic response of colon carcinoma cells does not require nuclear DNA. Oncogene 23: 7449-57.

[0667] Kabeya Y, Mizushima N, Ueno T, Yamamoto A, Kirisako T, Noda T et al (2000). LC3, a mammalian homologue of yeast Apg8p, is localized in autophagosome membranes after processing. EMBO J. 19: 5720-8.

[0668] Kedersha N L, Gupta M, L1 W, Miller I, Anderson P (1999). RNA-binding proteins TIA-1 and TIAR link the phosphorylation of eIF-2 alpha to the assembly of mammalian stress granules. J Cell Biol 147: 1431-42.
[0669] Kroemer G, Galluzzi L, Vandenabeele P, Abrams J, Alnemri E S, Baehrecke E H et al (2009). Classification of cell death: recommendations of the Nomenclature Committee on Cell Death 2009. Cell Death Differ 16: 3-11.
[0670] Kroemer G, Martin S J (2005). Caspase-independent cell death. Nat Med 11: 725-30.
[0671] Obeid M, Panaretakis T, Joza N, Tufi R, Tesniere A, van Endert P et al (2007a). Calreticulin exposure is required for the immunogenicity of gamma-irradiation and UVC light-induced apoptosis. Cell Death Differ 14: 1848-50.
[0672] Obeid M, Tesniere A, Ghiringhelli F, Fimia G M, Apetoh L, Perfettini J L et al (2007b). Calreticulin exposure dictates the immunogenicity of cancer cell death. Nat Med 13: 54-61.
[0673] Orvedahl A, Levine B (2009). Autophagy in Mammalian antiviral immunity. Curr Top Microbiol Immunol 335: 267-85.
[0674] Snapp E L, Sharma A, Lippincott-Schwartz J, Hegde R S (2006). Monitoring chaperone engagement of substrates in the endoplasmic reticulum of live cells. Proc Natl Acad Sci USA 103: 6536-41.
[0675] Spisek R, Charalambous A, Mazumder A, Vesole D H, Jagannath S, Dhodapkar M V (2007). Bortezomib enhances dendritic cell (DC)-mediated induction of immunity to human myeloma via exposure of cell surface heat shock protein 90 on dying tumor cells: therapeutic implications. Blood 109: 4839-45.
[0676] Tesniere A, Schlemmer F, Boige V, Kepp O, Martins I, Ghiringhelli F et al Immunogenic death of colon cancer cells treated with oxaliplatin. Oncogene 29: 482-91.
[0677] Tourriere H, Chebli K, Zekri L, Courselaud B, Blanchard J M, Bertrand E et al (2003). The RasGAP-associated endoribonuclease G3BP assembles stress granules. J Cell Biol 160: 823-31.
[0678] Tufi R, Panaretakis T, Bianchi K, Criollo A, Fazi B, Di Sano F et al (2008). Reduction of endoplasmic reticulum Ca2+ levels favors plasma membrane surface exposure of calreticulin. Cell Death Differ 15: 274-82.
[0679] Vandenabeele P, Declercq W, Vanden Berghe T (2008). Necrotic cell death and ‘necrostatins’: now we can control cellular explosion. Trends Biochem Sci 33: 352-5.
[0680] von Haefen C, Gillissen B, Hemmati P G, Wendt J, Guner D, Mrozek A et al (2004). Multidomain Bcl-2 homolog Bax but not Bak mediates synergistic induction of apoptosis by TRAIL and 5-FU through the mitochondrial apoptosis pathway. Oncogene 23: 8320-32.

[0681] Yang Z, Schumaker L M, Egorin M J, Zuhowski E G, Guo Z, Cullen K J (2006). Cisplatin preferentially binds mitochondrial DNA and voltage-dependent anion channel protein in the mitochondrial membrane of head and neck squamous cell carcinoma: possible role in apoptosis. Clin Cancer Res 12: 5817-25.
[0682] Panaretakis T., Kepp 0, Brockmeier U, Tesniere A, Bjorklund A C, Chapman D C, Durchschlag M, Joza N, Pierron G, van Endert P, Yuan J, Zitvogel L, Madeo F, Williams D B, Kroemer G.: Mechanisms of pre-apoptotic calreticulin exposure in immunogenic cell death. EMBO J. 2009 Mar. 4; 28(5):578-90. Epub 2009 Jan. 22.
[0683] O'Driscoll L, Daly C, Saleh M, Clynes M. The use of reverse transcriptase-polymerase chain reaction (RT-PCR) to investigate specific gene expression in multidrug-resistant cells. Cytotechnology. 1993; 12(1-3):289-314. Review.
[0684] Yajima T, Yagihashi A, Kameshima H, Kobayashi D, Furuya D, Hirata K, Watanabe N. Quantitative reverse transcription-PCR assay of the RNA component of human telomerase using the TaqMan fluorogenic detection system. Clin Chem. 1998 December; 44(12):2441-5.
[0685] Conforti R et al, Opposing effects of toll-like receptor (TLR3) signaling in tumors can be therapeutically uncoupled to optimize the anticancer efficacy of TLR3 ligands Cancer Res. 2010 Jan. 15; 70(2):490-500.
[0686] Bonnefoi H, et al, Validation of gene signatures that predict the response of breast cancer to neoadjuvant chemotherapy: a substudy of the EORTC 10994/BIG 00-01 clinical trial Lancet Oncol. 2007 December; 8(12):1071-8.
[0687] Brown, M. P., Grundy, W. N., Lin, D., Cristianini, N., Sugnet, C. W., Furey, T. S., Ares, M., Jr., and Haussler, D. (2000). Knowledge-based analysis of microarray gene expression data by using support vector machines. Proc Natl Acad Sci USA 97, 262-267.
[0688] Saeed, A. I., Bhagabati, N. K., Braisted, J. C., Liang, W., Sharov, V., Howe, E. A., Li, J., Thiagarajan, M., White, J. A., and Quackenbush, J. (2006). TM4 microarray software suite. Methods Enzymol 411, 134-193.
[0689] Saeed, A. I., Sharov, V., White, J., Li, J., Liang, W., Bhagabati, N., Braisted, J., Klapa, M., Currier, T., Thiagarajan, M., et al. (2003). TM4: a free, open-source system for microarray data management and analysis. Biotechniques 34, 374-378.

1-16. (canceled)

17. An in vitro method of assessing the sensitivity of a subject having a tumor to a treatment of cancer, which method comprises a step of determining the ability of the subject and/or of the tumor to induce an anticancer immune response, the inability of at least one of the subject and of the tumor to induce an anticancer immune response being indicative of a resistance of the subject to the treatment of cancer.

18. The method according to claim 17, wherein the treatment of cancer is a conventional immunogenic treatment of cancer selected from a chemotherapy using a drug selected from an anthracyclin, a platin, an oxaliplatin, a taxane and an antimotic agent; or radiotherapy.

19. The method according to claim 17, wherein the subject has been treated for cancer.

20. The method according to claim 17, wherein the presence, in the subject, of an alteration leading to the abnormal expression of an immune gene selected from a gene encoding NLR family pyrin domain containing 4 (NLRP4), DEAD (Asp-Glu-Ala-Asp) box polypeptide 58 (DDX58), chemokine (C)-X3-C motif) receptor 1 (CX3CR1), methylene tetrahydrofolate reductase (MTHFR or NADPH), human fat homolog proto-cadherin Fat2 (FAT2), aryl hydrocarbon receptor (AHR), tumor necrosis factor receptor superfamily member 10a (TNFRSF10A), sialic acid binding Ig-like lectin 5 (SIGLEC5), CPX chromosome region candidate 1 (CPXCR1), interferon gamma receptor 1 (IFNGR1), or myotubularin related protein 15 (MTMR15), determines the inability of the subject to induce an anticancer immune response.

21. The method according to claim 17, wherein the step of determining the ability of the tumor to induce an anticancer immune response consists in verifying the expression by tumor cells of immunogenic cell death marker selected from a protein allowing or enhancing CRT exposure at the surface of tumor cells, and a protein expressed during the endoplasmic reticulum (ER) stress response and/or during the macroautophagic response of the subject's immune system.

22. An in vitro method of assessing the sensitivity of a subject having a tumor to a treatment of cancer according to claim 17, which method comprises a step of detecting the presence of an anticancer immune response of the subject undergoing the therapeutic treatment of cancer, the absence of an anticancer immune response being indicative of a resistance of the subject to the therapeutic treatment of cancer.

23. The method according to claim 22, wherein the presence of cells selected from IL-17 producing γδ T lymphocytes, dendritic cells or cytotoxic T lymphocytes, in the tumor of the subject, or the presence of anti-CRT antibodies, in a sample of the subject, is indicative of an anticancer immune response and of a sensitivity of the subject to the treatment of cancer.

24. A method of selecting an optimal therapeutic treatment of cancer in a subject having a tumor, which method comprises a step according to claim 17 of assessing the sensitivity of the subject to a first treatment of cancer and, if the subject is resistant to said first treatment of cancer, a step of selecting (i) a product allowing or enhancing the secretion of ATP, HMGB1, LysRS and/or IL-8, and/or the exposure of CRT, ERp57, LysRS and/or KDEL receptor at the surface of a tumour cell, (ii) a product stimulating the autophagy machinery and/or an ER stress response, (iii) a product recruiting and/or activating IL-17 producing γδ T lymphocytes, cytotoxic T cells and/or dendritic cells, (iv) a product promoting activation of the TLR4/myd88 pathway, or able to bypass said pathway, (v) a product triggering the P2RX7 (P2X purinoceptor 7) and/or the NALP3 inflammasome, (vi) a product allowing or enhancing the secretion of IL-1b, (vii) a product capable of stimulating intratumoral Vd2 T lymphocytes, and (viii) a product selected from an anti-allergic drug, a neurotropic drug, an antihypertensive or cardiotropic drug, a spindle poison drug, an antimicrobial drug, an anti-osteoclastic drug, a diuretic drug, an oestrogen, or an apyrase inhibito, or (ix) any combination thereof, to be used in combination with the first treatment of cancer as the optimal therapeutic treatment of cancer for the subject.

25. The method according to claim 24, wherein the product stimulating the autophagy machinery is selected from an apyrase inhibitor, spermidin, resveratrol or rapamycin analogs and wherein the product stimulating an ER stress response is selected from a recombinant CRT, digoxin, digitoxin, ouabain, strophantin, proscillaridin, sanguinarine or thapsigargin (TRAPS).

26. The method according to claim 24, wherein the product recruiting and/or activating IL-17 producing γδ T lymphocytes, cytotoxic T cells and/or dendritic cells is selected from recombinant IL-1 b (rIL1b), recombinant IL-17 (rIL-17), recombinant IL-22 (rIL-22), a phosphoantigen, a Vδ2 T lymphocytes activator, a leukotrien, a prostaglandin, or a chemokine.

27. The method according to claim 24, wherein the product allowing or enhancing the secretion of IL-1b is selected from recombinant IL-12 (rIL-12) or recombinant IL-1beta (rIL-1b).

28. The method according to claim 24, wherein the product capable of stimulating intratumoral Vd2 T lymphocytes is bromohydrinpyrophosphate.

29. The method according to claim 24, wherein the product capable of promoting activation of the TLR4/myd88 pathway is selected from dendrophilin, HMGB1 and/or chloroquine.

30. A drug selected from (i) a product allowing or enhancing the secretion of ATP, HMGB1, LysRS and/or IL-8, and/or the exposure of CRT, ERp57, LysRS and/or KDEL receptor at the surface of a tumour cell, (ii) a product stimulating the autophagy machinery and/or an ER stress response, (iii) a product recruiting and/or activating IL-17 producing γδ T lymphocytes, cytotoxic T cells and/or dendritic cells, (iv) a product promoting activation of the TLR4/myd88 pathway, or able to bypass said pathway, (v) a product triggering the P2RX7 (P2X purinoceptor 7) and/or the NALP3 inflammasome, (vi) a product allowing or enhancing the secretion of IL-1b, (vii) a product capable of stimulating intratumoral Vd2 T lymphocytes, and (viii) a product selected from an anti-allergic drug, a neurotropic drug, an antihypertensive or cardiotropic drug, a spindle poison drug, an antimicrobial drug, an anti-osteoclastic drug, a diuretic drug, an oestrogen, or an apyrase inhibitor, and (ix) any combination thereof, for use in a treatment of cancer in combination with a conventional immunogenic treatment of cancer selected from a chemotherapy drug selected from an anthracyclin, a platin, a taxane and an antimotic agent; orradiotherapy, in a subject identified as resistant to said conventional immunogenic treatment of cancer according to the method of claim 17.

31. A pharmaceutical composition comprising a drug according to claim 14 or a combination of said drugs in association with a pharmaceutically acceptable excipient or diluents.

The application's sequence listing, which the Patent Office published only in electronic form, follows.

SEQUENCE LISTING (529 sequences)

SEQ ID NO: 1 - DNA, 80945 bp, Homo sapiens
ttccgaccaacactgaccactcctctaattataacttatcctcttgtctcttttctgtgggtatttctaaagcttactggtcttgttgctctcttctcttggcaaatttatctatgctgatggcttcagtgaccatgtcaatgttaatgatccccaaatcttggtctttattcctgatcactcatgaaccttctaatcttataactccacctgttctcttagatctttgctatatgctaacttatgtctaaagccaaagtcattgtcatactgactaaattgtgctcctctccaatataccattttaaaaaacactagaaatttctttttttatatgtcaaacatatagtcatctttactcctactttaaaatgtatttgaagaaaggattattcaattgtattatttattctttgttttcttggtaaatgccttcctttctattatctgttgtcattacctgcatccattcacccacccatccatccatccactcaccatcatgccctggttaatcttcctccagataaacctacttataagtgatctgtacaaaaaacccgcagtgccaattttcacttgattaagtatattaagtgttcctgaatatattaagcagttccatctgatataactgttagttctcatctgcttctaacttgaattctctctaaattaagcatcatgtgccctaggctgtgctctgttacaaaagggtgggatcggtacagttgatagcagctgtactacgtcctttgtttgttcttatttgggttgggagcagttccatggggaataaagaaggtggagagaaacatcccactacaatgatagtttatttaataatgtcctcatgccaaggtcatcctcactcttatgaagtattaattcaaaatctctagttgtcatttctagattttgccaaagagttacttcccttcatgaggcacagcttccaacaatgtagagcccttggctgctttacttggagagtctggcttctgtgccaaatatatgtatcattctgtgtactttctagctgcagtctctttaaaagccaactgtgggtaatcatctcagggaataggcatctatgttgtaacccttgaagaatgttagcaatcttttatttttctccataattttaaagtcttgtttcataagcttatttattctctgacttcatttggcaaatattgtttgacaaatattcttgagctactaccattggataccaggtattttgtttggttctgagaataaaatgtgaaatctaataggcccacactgtgccttcatagagtggggaggacagataccggacaaacaattacaaagaagtttgaggagtataatgagggaagtacagagttctgtggaagcacttggtattagcatagctatctcagttccactacttgctggcagagagatcataataaagttgcttaaccactcaaaggttcatttcctcgtatgtaaaactgtggccaataatagcacctgcttcatagattatttttattaggattaaatttttaaaaacacatttagcgcagtatttggcacatagtaagtacccaataaatgttaactgcaataataaaataacattaattttacattccaaatcattttattgcattaatttatacttctaaaactttaaagtcgttttttttaattctcggcagctatattttttcacttctgactcaaggcttttaaaacttctttatgtttgtctattaattcagttcctcaggcattattttattcaacaaatatttattgggtgcccactatataccagactctgtgtcaggcactgataataaaatgctgagcacaacaaataggatcctttccctgaggagcttacagtctactgaaacggatgggcattaaataaaccatcacaggaagaagtacaggatcacaaatggtctcaacataggtgtaagtacatttaaagaaaaaaagataatgatctttaacagggcaaaggcaaatgagattcaagctataaaattagaactagtcctaatgtcatgaaaatattatactttcttctaaagccccaatcctaaaataatacggattaatcttaaaggctagaatatgtgtttccaataagctacttctttgctctataaggtagctgaaaaaaacatactatttattacaattttgcaatgggctacattattcaaataaggacagtttaaacatggtcacatcatttaaaatgatagctacacgaaaactctgttaacattagaaatatactattctatttcaatccaacaatgccagctgcaacatacatgtttgttttgccagtgaaaacaagcagacacattaatgaatacactgatgttttatttaatttgtttccaggccccagctcaaagtgctttaaaatgtggattctggaatctaccctaactgtgaaaactgtggccagttacttagaatctcagtgctcagtttctttatttagtaaagtggggttaacaatagtatctacctgaagtgttagaagagaatgtgacatgtgccaggtgtggtggctcatgcctgtaatcttagctcttatggagggaggggtaggaagatagctggagcccaggagtttgagacttgcctggacaatatagcaagatcctgttctccaaaataaggaaaaaaaagagacaaagaagagaatgtgacatgtattgagaacccagtaatactatgaatgaaatggtagctattgacgctaagcttaattttttttctttttctttttctgtttttttgttttgtttctttttgttgttgttattttgttttgtgtgtgtgtgtgtgtgtgacagagtttcgctcttgttgcccaagctggagtgcaatgccgcgatctgggctcaccgcaacctccgcttgctgggttcaagtgagtcttctgagtcagcctcccaagcagctgaaattacaggcatatgccaccacacctggctaatgttgtatttttagtagagatagggtttctccatgttggtcaggctggtctcgaactcccgacctcaggtgatcacccccactttgacctcccaaagtgctgggattacaggcgtgagcccccacacccagcctctaaggttaaatttttaaaaatgaaggatatgacttagggtgaccagactccctaagttgctggggactgtagggtttcacctgaggaagaacttccagtgagtctcgtgaaccaatgatgaaatgtatgatgaatcaagaatcatgataaatctaatttggaatacttgagggtcatgaattttagtccttgaattttgattggttaacaatattttagtgtttgccatatcccagaagcagaaagccagggaataataaatgccgcctcaagcacacctagaccagtctactccttcctaaaataggcagaatttaccacctatgctttaacaaaggcttgaataagcagagcatttagagaggagagttcaaggtaacagagagaccactggtctttagatatgtcctaagagcatcccaataggtatagaatggagaataatgctaaattaaattctggcattcttgcttttttcttattcttctcatggaaggtatatatattatctgatgtattgcttcctttataaaccttgaaccttaatatggtgtctagcaaatgtttggtttttagcaacaaattgtagagttgaatatttcttaaggctgaagagataaactttttatattcatttttttcactttacagatcagtgcctattgcaaatttatagatcaatttaaagagaattagaaagttccaaagtttgttgtcacacaattgactttgcaggttggtatttattttatcaaacatcacttacatgccctttacaaatctagctttgggaaattaccgtggttagttttcttagctcatgcttcacaatgtatgcagttttgccaattgttgtaatgtcaatatgggaaatataatatgctaaatacagctactgtatttagcaactgttccagtaaagcattctccagctgtctgggagtcacaatccgtagtcttaaatagatgtatctgtcatcagtttcattagcttcggattatatgtatcatctgttggttttgggtgtaaactggcgtgtgcaaatgtttttctcataatatatttttttaaaaggcacacaattccatagatattcattttattccacaaattcagaatccacaaataattttgtattttaattatatgttatattctcatttatttgatatattattaattattatcatctatttcatttattatatccattatattttcatttctgatgccagaatccacctgtgactattaaagatgtagagaggtctgtttgccttacatcattccctagttcttgctgagcatgtacttaatgggaagctgcagcagaggactgggacagccttaaattgttggggaaatggtaacggagagtctattttcatcaaattgagaggctgagtgattaatgtacatgcaataaacttaatagatttgaggcagtttgcacggtaagtacagatgggctaatgacatacaaaagtaaaaggagaaaatctttattaaaagatcctacaacacagaaatgtataagtaaagacatagactttaaccctgagcttcctcgttcacaagggtaaaagagaaaaacaggacagttacttcactttaattgtttagaacaatgactcccaaattagtactccctaaggaaagttaaagacaagtaattaggacctgggtatctctcatccctgagtcaaacaaagcagctccatgttcacctgttttccatattagaccagtttccgtattaacagcactggggaatgagagaagggaaggtttagtttgtagtacctgagatttctggggtgtaaatgtacatactatgtccaatttcaagctatcaacatgacataaccaatcacaatgttgggaagagatgcgcacagttgactctcatgaggtaaattcttgtctggatgactgattggcctctttagtgcatctgctgtgcaaatgacaattaattaccagtgatatgttgatcactccaagtatatctctggcttctctttctctccttagcctttagaatcattttctaattacctattggatatctttattttcaggttcagcagacaatttgtactcagtatgtccaaaaccaaattcactcccccatatacacacatatactcctgaattccctctctcttaatggcatcattatctgcccaatcattgacaaggaaacatgggaggtatcctagaaaactttaccttccacatcagttgagcatcaaagactattttttttcccaaaaaatacttgtcaaatcaatcctattctctccttctttatctgtactcctttagttcagaccttcattttttgtattataataacctctctactggtttgaccttttcccattcatttccaaatttttatgagttattttaccaaatatggtttgtataacaaaacactcattgaaaactactcaatgaaaatccgtggacctcacagacactaaaatgttttgctacagtttgcttccagcctattttttcattttcatctgctaatgaatcttctataataaagatgttaaaaaataatttctgctccttctcaaccacaagcttaagacagatatcacaaattaatcacagccaagctttcacatggaataaggatatagcttcagaaatctcatcattcaaccgtggctttcaagcagctacctacacactcacaggaatttgttcgtgaaaggcagcatacttggcacccatttatcctctcttccagtttttataccatagcaatacttgtcattcaaaggacacaccatgtggaattatgccatcatgcctttgaacatgctattccctttacctgaattatcttccccattcatgtttttcatatatttacctttcatctttcaaattttctctcaggtgtcactttttctttgacatttccatgacaccgtccaatcccctggctcaaagagatgaggagaatccaataagtcaataagaaaaaccttacttcatcaatagaaactagatagaaatataactctaaagctctatatcctttctttctatgtcttttaaaaagaagcaaaaacattgaggctataaaatatagaaaacatttttaaatcagaaagaaagaaatatatacatttcaggaagatttttctaccactatatataacgctatgtctaaataggattttcttacaaacttctgagaattagaaaaaaatcatttcttgagtattctttggaattgtcatttcaatggtgatgagaaacatgcatttgaaagacaatatgaataacaatatgctttgtctaatgtctgctctcagtatttgactggtatacttggaggaaatccatgaaatatttgaccataaaattgtcaacactgcaagaggattttccttgcctgatgtaaggttgccagatatttagtttgaactcaactatatggataaataagaatctccatctaagttatgaacaattattgtccttgatttcctattccacatcaccagcaatgatcctaggttcttaaatattcaccacagaaacaacctaagtttatatattttgcagtatagactttttttcccttctccttccaaggctcattttttaaattcattattttctcatttcttaaatcagagattcttaggatgagtttatggtgtccataaacccttaacactacatataaaacatgcaaaatatatgtatatttttcttgggaatagtatagttttaatattttttacaaaggtatgtgccacaaaaaacccatgaaagactgatccattaaaagttgctttctgttcaatattccctcttgaacaatattttccttttattatttgctatgtgctcaatcttctacaactgtgagagcttcatttcccatttatatttagatgatatcctgattatggacaacagctactacactcagactcgctcttaagctccagatctgtatttctaaatgctactggactgaccccttaacctcattatgtcattccaaaataatgactgaaggccaattcattggatttggcactggaaagacaaggcggcctgccttcaaagacatttttatacaactatcctttactgagcacataatgtgttctaggaattgtgctacatattttaccttaaaaattgcatcccatttaattctcacaacaaatctgtgaggtttacagataaggaaattgaggtttcagagaaattacataacctacttaaaattatgtaataacttagttgggaagaccaaatttgaattgattttgtctgtctctagggtccaagtttttatcactatgtacttcttttaatagttcatggttggaaggaggtcattgcgatagcatttacactatggcaagcacaggatcacctactacttaaaaatcctctgcaattaccagtggcctcaataaccaagtccatactctttagctcagtttataatttggcctcaacctacatctcagtcctcaattgccagcatattctccatctacagtctagcacccagttacaccagactattgatcctttcttcaatacatcatgttctcctctcatgcttctctgccttgtatatgtcatccagtaggctggaaattcacttgtccctcttgtcttcttaggagaattattttattttcataacctattcaaatgagtgtcaccttctaagtaattcactgaggcaaaattagtgaatttgcctccctgttctcttataacacttatgcccttaccatagggcttggatgtaatcatttgtttactgatctttctccattcctagataaatcccttggggagaggagctatgttaggtttctcttgcgccagtgatggtagtgcattacctagaacatatggcaggttattcagtaagtgtttgtataatgaatagtattcaatctttatctgcctttgatgttgagcatctttatagagacagaaaacctcaatataatgttatctttgatatggccattttctgtatacataaatatcatttaagtaatattacataaatgctccacaaaatatggatagcttttacatttttatgtatacttttgacattgttttctagaagtttgactttaactcttcaactgtttgaccagctgacacatatatggaggggaaactattatatggggctatgaataaggtgatattttctaacttgcttgcttggtaaaagaattttttgtgtaagaaatgagatttcagaaaagtcacaattaaaaaaagaaaaaaaaataagaaaagacttggaagaggtatgagaaaacccatgacagtctgttcaagaagaagatggcaatgattaatgttggagaggggtgccaacgtaatacaatgggagaaacaatagtcttttcagcagaagtgctgggacaactggatatccagatgcaaaagaatgaagttgtacccttaactcacaaaatttacaaaaattaacacaaagtggatcaaatatctaaatgtaataaccagaactacaaaactcttaaaagacaatatagagacaaatttttatgatttcagttttgacaatggtttcttaaatacgacataaaattgatgaaataagcaatgattttaaaaaattagacaaattggacaatgataaaagtacaagcagtgataagcataagcaattatagaaattacataaattggactttatcaaaattaaaaacttttgtgcatcaaagaacactgtcgagatataaagaattacactgtcgagtataaagaaaacccacagaatgggagaaaatatttgcaaatcacatatctaagagtctagtatccagaacgtataagtaactcctacaactcaataataaaataaccgaatttaaaaatgagccaagagtttgaataaacatacctccaaagacaataaaaaatggccaataaacacaggaaaacatgctcatattatggaaatcaaaaccacaatgaaatatcactttatccctactacaataaaaaggacaacaataacaaatgctgggaaagatgtagaaaaatttggactttcatatgttgctgatgggaatgtaaaaaggtatagccacttggaaaacagtttggcagttcctcaaaaagttaaacatatagttatcatataacacagtaattttattcctagatatatacttaagagaaatgaaaatacatgttctcaccaaaacttgtatataaatatacatagcagcattactcaaaatagccaaaaatagaaacaacccaattgcccatcaactgatgaagggaatagacaaatgcggtatatctacacaatgaaataatattcaggcataaaaaatgaagtattaatacatgctacaacatagacgaaccttgaaaacattatggtaagtgaatgaagctaataaaaaaagaccatatattgtataagccacccccaccccggccttttttctgagatggagtctccctctgtcactcaggctggagtgcagtggtgcgatcttggctcactgcaacctctgcctcccaggttcaagcgattctcctgcttcagcttcctgagtagctgggattacaggcgcccgccaccatgcctggccaatttttgtgttttcagtagagacagggtttcaccatactggccagcctggtcttgaatttctgacctcaagtgatctgctcaccgtggcctcccaaagtgctgggattacaggcatgagccaccccatccagccttttatgagcctatttatatgaaatttccacaatatgccaatccacagaagcagaaaatagatcagcgttttctaatagctggcagaaggaggaatgggtagtgactgctagtgagtatggagctgctttttgggatgatgaaaatgttctggaattagtaccgatagcttcgtaatcttgtgaatatactaaaaaccactgaactgaacactaaagtgataaatgttatggtacataaattttatttcattttttcaaaaagtactttttacatagcattgttgtaagactaaattaaagaaagtatgtaaagtgcacaggacctgtaatcgataaatactaattcttattttttttttaaagaatcgaatggtaaagatggctttcattcatttgggggaattaaaaataattacagtttatatgagatatggaaagaggatacaaatctgttaaaatatttttttcaaaatacttcgtatagggctaatgaatcaaagggaccactttatccacattttcctgactagtgaaatttgcgctaatgtaggtacaccaagctgtacttcttataagtatcactacaataacaaacacctagggatggacacagcactccatccaataactgtgtgaactcattacctaattattattataactaatatgttggttgctatatcacataacagatatgaaaaaatacaatgtaatcacaacaacgtcagagtttcatatcatcgttaatagagctactggctgtagcaaaaatattttaaattatcaaagctaacctataatcttttcacaggtacaatatgtagtggtgaacatttaactttaaatagcacagcacattgtaaaagtcaccctatgtcataagaagtgtataaaaataattgtttatgattctacatccctgaaaaatgtgcatgctgcacgaaatgtttaatgtgtccttgaccaaaagggaatacaacattaattttgttttgaggacaagtggactccagacaaaagacaaaaataggtaacttaggtagatacaacagttttagaaaattctgttcctgaggtggtgggatttttagggaacttacctttctcaagaacataatttcaaaagacactctgtaaattcatcaaagtttaatgatgaagagacacaataaatgttatgaagtttagtggtggatactttggaagtgaatgccaaagattacaatttagagaagaccacaaccaagaaacagttaacaaagttttagttgaatgaaaaattttaaaaaagtacatccaatttcttcaaaaaatttgtttcttctgcgattccaggtttaattttggttatcccatgacaagtggttcacaacactgggaaaagaaaggaaaaaaaagaaaaaatatattttatttgcatagttcatatttttaatattaatgtacatatctaagaatgttttcttcatagagctttcattctacttttgttttatatgtaattaaaattgaagaggatttgacatcccaaatcctttttaaatgtttttctgtatatggtcagcagaaaacacaaaatatagtgatccttccacctcagtctcctaagtagctgggactataggaacgtgccaccacacccagctatttgtttatttttcatagagatagggtctcactatgttgcacatgctccagctatcatttattgactaattctaaccttaatgaaatagttcctgatttttagatttacttccaatttccccatcccatcttaaatactaccacaaactgttctgaaaactctttcctaaatacacataagtttccttctcaagaacccataatttctccttgttcatcaaatcaattttaagtatcaatcctaagataccccatcaactaatctaactttgctttcttatctaacggcattttccccattccctaacgcataccttccacttcaatcacactaattttcttcatttcctcaatatgtcagattcatacttctcactttatcatgtttaattagaaaacctacttgccacttacttaaattgtacccattctacaagatccatctcatgcagtacttgcttgtgccatatgttcttcacaataacttaaattttatcttgtattgtttaagacgtttaatcaataagccacatttctcatgtaattgaagaataggctggtgaaatcttaagtgcttaatcaatgtgcattgaattgagctaaatttatatacttaacttgaatttatatgcttcaatattgtactgttgaggttaaacatctttaaaattactttcatattattttatattatttggtcactcccaagttttctcagctacagagctcatgaggttgagaccacagtgagctgtagttgtgccactgcactcagcccaggtgacagagcaagatcttgtcttaaaaataaataaaaataaatgacagatgaaaactttattccatcatatgatgtaattttatacacgtggaagtaaatgaataagctttcatgcacagagcactggaaattttgatgtagtttattctgtccaatatataaaattactatataaaattacctaggaaagtaatgagcacttagtgtaattctcctgttttctgagttcacctattgaggaaaactgaagagtgttttcatagtcaagtttcaactgaatttaagtcctgagggatgaaaactaaagtatatacacacatgtatattttaggaaactttcttaggagatacacacacacacacacacacacacacacacacacctcctaagaaagtctcaagggaaaaaatgtcagtgggatgagcccttttaggagaagcagaataaaagactgactacaaatcaaaaagccaaagaagaagccacagacagaaatggagacaagatccagaagccaggctgaaacaggagggcaacaaatcaagtcaggaaataactgatatgaagcacatcggtgccttaatagtggctgaatatgtgggctagtttaaaggtgaaaaagtctcttgacgccataaatataacacatatttctaaaaagaaattcattgaaaagggggaggagaattattttattcctttagaaagtataagatcaaagcacagagcaatatttttccaaatctgctcaaaatcttgccagacatggtgttatgtcagtccacttccacttacagaattagccatagtgcttctaattatgaccactgcaaaaaaagtaaaaatactagtaaaatgtaaattgaagtgaaagctattcatttataggaaaggtatcatacaaactcacagacattcttagaactggagatttataaaatttaggtaccaattgaatatgcaattgtttcttctgcattatttgcccagaagaaccaatacttcacaaactgtgtttagactttattagctgagcaaaattaatgacaagagaatgccacgagacaattttgatagttgcttttcatatcatgaatacttatctttcaaaagaggaagcaatgttaaatatgcttaatatggtttaatcctctcaaagactttgtaaggtatcaatgaaacttgcacatgtgtgtcagttaggttttagtacaggaaacagataagtttcaggtatttcaagtaaatagggatttaaaacagggaataaaatgcttactaaatctttgggaaggctagagagagaggctctaggctgggaattcagaaatgtttccataacactgtagaactgacttattagagaaagatgacctttgcttcaatcagaaaagtggggacttcagaagtcactataaaatttattgacttcaaaaacacaccattgtagccacaattaagagatcagggagccactactgctcacacccctacagcctctcaaaccctagaacttggatgctggaacccatcacagaaaactcatatttccacaatctcacttattagcagaaaacaatggaagcagcaggaagatgacctccacttgacttttgcttccaaatctcaacaagtgcacctaattggatgaaacttatttacatttggaagtttaatggcacaggaatctgggaaaatttagtttttagctttccagctgctgtagtatagaaatacacagaatggaaaagtgcaaatggttgccagttggccatatccaccatactgagattcaaaggttttagaaatttcttatccaaggtcacagaacttgtgagtgctagagcaacaaacttgaattcaaagattttggccacttgcccagtgctctttccactacatcagtctacagcactgattactctctgaagacatttgccaaaggagacatattttcaaatcttgtgctaattatatttttcactgaagcattaattcaggcatctgtgaacattgttaccttttagtcttatgtcaaacctagttcttcttccaaactcagacttaatcttattttacagtaattacagttaaaccaacactgctagggtttaatacctttgagtatttttctcagcaggcttgctgcttaatccatttaatgtcagaacaacacaaaccttcttattaaaatgggggaaaggacgttattagagactgcattagtggtcttttcttctttggggtaaaacctaccaatatggcaatatttgcaccttatctttattttgttttctgctgaccacatacagaaaaacattaaaaaaggaaagatttcagatgttaaatccccttgaattctaattacacataaaagtagaatgaaagctctctgaagcaaatattcctagatttgtactttaatattaaaataaaaaatatgaactatgcaaatatttggacaaaatgaaaaaatataatgcctcagtaatattcatattcaattaaatcatcactttcatttcaaatgcactttaaagtaatttggggaacatattttaaaatgtacatacaatgacctaagtacaaagattcctaacatataccttaagagaaaaatagaaattactacctaacacttctgattagacttaagcaacaatactatgttaaaattaaagaggtgattaaattcatataaataaaaggtacatatcatgattgtagttagaagagatttgattgcactctttaaacaaggagataattattgttcaaaagttgttagatcaagtggatctagtagttttgtgctaagagcatatagaaaagaatataataaagaaacaatgtatgtggttgttaaggatcaaataaagacgttatgtgagtcttgtgtaggttagattacatcagtatcacagattatttatctccacatattcattagatacagaatgttaactttataagagttggcaaatttttaaatcaaaaggaactattgtattcagcacacaaagcagtgaaggctgtgattaacctcaagagaagtttggggtgcttactagagaaaacaattgatcctgagatttttctgaacatttctatttgtcattggaatccgtcttttgtaaaagactgttttcactcctgaaagtcattatgtactctctctgtgtacacacacacacacacacacacacacacatacacacacccctctatatataatatacacacatataaatgttgaggggtatattagagagatcacacaataaggctttttcctttgctttttacataggaaactaaaataataagttcaatttaacttctaaattcattcagattagaaagaaaaataattaaaaattgtgatagtattttttttgttgaaggatcttttacattaaagtcagcagtattatttggtaagtgggctacagagtagaacttaaaaaatatatccctatctcagttatcccacatttttagtatcttataagaaatgaccaggccgggcatggtggctcatgcctgtaatccctgtgctttgcggggccaaggcaggtggatcacctgaggtcaggagttcgagaccagcctgaccaatatggtgaaactccaattctactaaaattacaaaaattacctgggtgtggtggcatgcacctgtagtcccagctacgtggaaggctgaggctggagaatcgcgtgaacccgggaggtggaggttgcagtgagccgagatcgcgccactgcactccagccttagtgacagactgagactccatctcaaaaaacaaaacaaaacagaaaaacaaacaaacaaaaagaaatgaccaaagaccataagttgtaaactacagaagttgaagttacctttataatgattttatatatatgtaattatatatattatttaatatatgtatgtttgtgtgtgtgtacttgctttttaaacagacttatgttggacatatatttcaatgtcaaagacagtgcttttcattattctttaggtaaaataatgaggtgtacatgactctagtaagagctaattggaaaattataatgtttgacactcctttactgttttgttttcttattttttgactattaattaaaaggatgtgtagaaaacatgaaaaattaagtattaatttcatggtgacagatatttaccatctattttttctgagcataacatatagtaatatagaactcagaaattactggcttaaatcaatgctattgtttattaccaaattaaccattattattctagtcatctactgaggagtatagtttccaaataaaacttaaattgccacttagagacttgaccctaaagatgtaatgacataaagtgctcagttttgagaagtatatttcactttgtgtactgatggattttcctcatcttgttgagcagatactaaaaggtaagaaaagggctattaagttacagctattaagtactatttattattattgaaaaaaatatcatctttaggttgactgataatgacatttcttttagaaggattgagtgtttgtgtgcctaaaaaccacgacctacttcataactggctaataccttcagtatgaacaaactttttaagaataaactgctgtatgtgaggctacttcttttattaatatttcatgtagggcatgtttataaatatttgagaaaattctatcagaatgtcaaccttttttatatcctaaaataggcaaatactaattaaaacaaaatggtctgggggattgaattaccctctactgacctccatttttctcatcttgttaatgcagttcttactgaaattaacatttgtctgaactgttcaagagtaactaaaaaaaaccaaagtttgcattttatatcattcatttactttacatatacaatcaaagcactctaacaggttacagattggtgtttttactcatataggtgtatgtcaactttcttttataggggagatttgcttcaaagaattatacaaaaaactggcataaatatgaccactcacaaaatgtgtttaaataagtaaataatatggaaaaatacaacacaaatatgtaatgaatatttgaaaaccctggtttctgaagagtttagatagggattgtttacattataatctacttggtatttctttaaataccaatgtatcccaaaataattattcgattcacatgcttttctctgaaacatatttgctttatgtaatttatttaaaggctcagataaccagaatgaattcaacctaacgcaaggattaaaagaatgtaagagatctgtccaagatctgggaatacatcgaatccttcctactcattttcatcagaagccctcgcctctgtgaagacagatgggagctccatctacattcaggcaggaaggccactcaactaaagtttaaagttttacaaggaaaattcctacagcttgctttaggagggaagggtggagaacattctgttttacaggacactccaccctcagctatatccccttgattaattatgtaaccagatctccttcatcaacttaccgattaggtaatggcaggtatttctgatgcttggtatggggtctgagtgaggagggtcctaaaaatattacttatgcagctgttttgcatagcattaaagtgaaaagctttaacttgcagtacaagttaacatttgttccagacttttttttttaaactattattttagcatgtaagccttatagacataaatcctgtctactgatacattataaagtctcagaaaagtcagtgattatatacaggaaagtagataaaggagaaatttcaaatgcataagaacaagcaaaaaggtattcgtaaggtattagaaactattagcattttagtataaataactggtgaatacagcaaaatgaataatttgtggttagtataaatcagctaaattcttgtaatgcacaactaactacacatattcttcagcccacggaggccatacaatggagatttgggattctaactttgttttcaaaatggagaagtgcagaaactttgaatcttttaaaatttatcttccatctgtttcctgtaatatcaagatttagagcaaggtctaaagctttatcttacgtaaaagctgggtgcctaatatgtatctgtcctgacctcccatggaaacaattatcaggcttcagatattttgtctctcaattttttaacttgaaagtacatggctatttatttttgcacttattttttgtttttattgtgcaatttttcaacatatggcaaagttgaaagaataccacaaatgtttgtatacctttcataattgtgtatatgtgtatgtgtgtgtatatatatatgtatatatgtatatatatatatgtatatatgtgtatatatatatatgtgtgtatatatatatatatatatatacatatatatatatgaatgttgcagcatgcatttcctgagaataaggatcttctctttattctagaggtatatacctctacaggtgatagaggtatataaccacaatacctctatcacctgtaaaatcccgattccaggacacaacatagataaattaaataaaaatttttgtagtggagccaaggatccgtaatttttacagttctcaagtgactacaatatgcaacaaatgttgagaaccactgtccacacattaattaaatttgttaaatattttcagtaaagaatacattttgtttcttaatatgaataagaatgatagccttttaaagtttagcaaatctaaattatatattttaggtcagcattttacaataatttacatttccttaagctgttcttatcaagttaataattttctttgttaaataaatgtattttatcttaatttcagtttcttctatatcatgatttaaaatgcagaaagtatgtattatgtagttttcaaatatatttatctccaaagttaaatggattttagtaaaaatgatatttatacatatatattttaataaaatgtttaataaattagacatgaatcttagcatgtgaaacataaaacttttttataactttccccataatcaaacttcaaattcgtaagaattaaaagtccggaaagaaagaaatcgaaatccaaacttactgcatgttaacattttaataatgtactttcatgtgttaaaaacctaaatgtttcttgcaacaaagcattatccataagtgaataaaaataattttgactaataacaaattattcctatcttgtagtttctttgtcagaattaagattagcattatctattaattacttctctgtggcttctatgacattgttgtatccaagcaagtaaagaagacattaagcatttagaaacagcccttagatgtctatgtctgttcttcagtgttaggagtaaaagcaagcaatgtgtaaactgattatttttaataaatgaatcagaacagttcaaagtcagataagttatacattttagactggggcagaagtcacaagacccagattctaggctatgattagcagggcacttgatctctctgggcctgaagtttctcacctgttaaatgaaggatttagttatgccaaaggtcccaaactttctcagttcacagcattcctagtgtctcagtaattttttcatggtgttgcaagctaaaagaaacacctaacagttccatttattaaacagttaaacccaaacttatgtttgtctatcctaacaacttagtagctatttaaaaaataatatacattaacattttttattcttaatgggatgtgcacatctgttgggcacttcataacttctcaaacttaggaataaacttggaaaccgctaccctcattcctgttctacagtaattttcccatagtccttgtgttttattacagcaatttacaaaaacacagcctcacaaagatacgatgtcaaaaggaatgaagtacaatttaatgtgtagaagttctgaactacctcaagatagtggtttgcacggtgtccaactgatgtcactgtgttggccttgaaaatttaaaatatcccatgatagtgcccctgtgagtttgttgtggtgctcctggggtgcctcagtacatagtttaggaagcatggactaccctctgtaaaatacttcatatagctacaatgtgtgttgtaaactgtaaaagacaattctgagggcctgaagtaaggagctgcagaattgaagaggagattaaaaagtgatacatgttcagtctgcatgaaattccccttcctccccaggtcacctataaaatgcctacctatgcctacctataaaatgcctacctatgcctcaaaactcagctcaagctccctcagggaggttaccaagttacccttaccaagttaaatccacctattatacattctcacagtattcatttcacagtacttgtcccagttgtaattatacattcatttgtgtaactatctggttaattcttgtctctctcattagaatgtaagctctaagaggaaagaacatgtctgatatcactactgtaacccacagtgtctggtatattataggggctaaaatcttgcttagtgaaatgaactgtgatagaataggtttagcattcattttgattattttcctttattcaagaacagctgatatttataatagcattcctaaaacatttttctcatactatttcgcaggagaaagaaacccatacacatacagctgcatctgaaacctcagaaactaagctcaacccaattgattaaaaggatgttctttggataaggtaatcaaatgttcaccgactcttatagccaaattaattattatgagataaaaatcacgtaactacaaaaaaaaaaactgctcacaaaaaagtttttaaatcttagcagatggacacaaaccatactttgagaaccatgttccacagtgccaatacaggaagtttctagataatggcagctcattttttaaaaatggcactacactatactgtattcacatgccagcaaaactgttaaggtaagttcatgtcactattaaaataaaatgaattctgggaattttgttgatattcaattttaatcttaattatgcaaagatctgttacttaactaagactatgtaacataatatagcatatgacttctggataatgaaaataatcctaaacttaaccataaaaaaataagggtatgaaagtcaaaataaggtagaaaatgactgcaccaaatagccaacaaccttaaaaagggtaggatttttttaaatcactaaattaagattggttcattgcatttagtacatctcttttatgaagaggagttataagctacagaatcaataaattatgttttgatataaatttttcacccttaaagttcctagctaggaggaaattattcttttacacttacacgttttagatagaatggctataagtaagcacagataaatgaagaaatgaaagagaagggaaaaatagagatggttgattctgcctctgcaattgctaattcataaacatcaaactttcccagtgtacactgtcttctttgggaatttgctccatctttttccttaaactgaaaggtggcttactgaggctatcactttcctaaaggtctccccaatactgcctaattattttctcttatcacaggatacagggtggatgtccatctacttccttgttgtcacttcccagatcactttcactttatgctcttctaaaattaaaacaaagatcatcgaccacaaaacacaattgttcttttgtagctcatgctagaataccctctttgttacatctccttcatttttctgatccaaaatttagtagcctactatatctcacccactgtccttctttcctccagctatggtagagaactgctcctccaactttatgtacatttgaatcacctgggagttcctgtgaacttcgggttctgatttaataaggacacccaaagagtctgcatttcctgtaactctcaaaagaagctgtggagtactctgaatagcaaagcactgtaagtgctgtttctgttagtatctaatctattagtcctaatctcccatttatgctttggcactcattccctcctgctttcggtatcttaatatctatcattccttcactcttccctcaggttccctacatagtttatctctaccccctctaagccgctcagtatcgcccattaaagaactaaaccaaaactagaaaaccctcatttaacccttcactccccctacatacaatctgatgtgtctctcatccacagctaaacttggaagaaaaattgcctgcttgaggatgccattttgttatcttcagctcaatcctgtacccacttcaatgttatttgcaggcccattaccccaacactgcattcacgaaagtcatcagtgactacacattgagaaaacaagaatgacattttcagttctcaactaatttgaatttctcaacagtattcaatattgttaattactcccaatatttttccacatggtcctccatgacacaatacataatagtccccttattatctatattcctgtctattgtaaagacttcccccgcacaccaaaaaaggtcaaggaaactcctagccttcaagtctcaactcaaatctggccttctgaagccttcccaactaggaaaatatacagtcccattggttgtctaccagttgtctaccagttaattgtaattcttagccacaagttagctgacccaccgtctctcaaacaggtgaagttaagctcaatatttggcatatcttgatatactttgtacagtctagctacaataagtttgcctatgcacgaagatggctaccggcgggggggggcgtccttacgtcctacgtcatcacgtgccgggatgagggtggggccctcaaggaagacggaatggaatccagatgggcgggggcaagcaggacggggcggggctacgcgggatctgggcggggcggggccggtgaggggtcgggggtgctcctgctattcagccggtgcgcgcggcggcgggaggcagtggctggggagtcccgtcgacgctctgttccgagagcgtgccccggaccgccagctcagaacaggggcagccgtgtagccgaacggaagctgggagcagccgggactggtggcccgcgcccgagctccgcaggcgggaagcaccctggatttaggaagtcccgggagcagcgcggcggcacctccctcacccaaggggccgcggcgacggtcacggggcgcggcgccaccgtgagcgacccaggccaggattctaaatagacggcccaggctcctcctccgcccgggccgcctcacctgcgggcattgccgcgccgcctccgccggtgtagacggcacctgcgccgccttgctcgcgggtctccgcccctcgcccaccctcactgcgccaggcccaggcagctcacctgtactggcgcgggctgcggaagcctgcgtgagccgaggcgttgaggcgcggcgcccacgccactgtcccgagaggacgcaggtggagcgggcgcggcttcgcggaacccggcgccggccgccgcagtggtcccagcctacaccgggttccggggacccggccgccagtgcccggggagtagccgccgccgtcggctgggcaccatgaacagcagcagcgccaacatcacctacgccagtcgcaagcggcggaagccggtgcagaaaacgtgagtgtcccgagcgcgtcctcatcgcgggggctgggcgctcaggcacgcgggtgcgggaggcagccccaccccgcccccaaatccctgcgatcctgggattaggtccattcccggcactgcccgtggaatcgaggtttggaggccggctgggagacagaggacttggattctcccgttttcaatgattgcattttaaaaattgtcctcccacccatcctcttcccccgcaccagtgcatacacaccctctcacatttgcaactttgttctttctgatttggtcctgatttgttgacagctctgatctgccttgggctaatggattagttagtataaacctgtcttgaaatctccttccacttttcatatccgcatgggttaggttagaggacggtcttaattctcattcttcgtagagtttggtaaggcgagatgttttaaagagctaaacacatgctgacttttacgaaggggctgagtgcctctaaaggtactttttggtccccaccaactggctttgtgttgcgctcatatttacttatttggcagcaattttgtagcgctcatcgtgaccatatcggtaaagtggatagaagtggtagcaggtgggagtggatgcaacggacaggatacggtggaggatttgtattcttcagacatctttttcggaagcttgcttatcacttttggggtggctttagggtctgtaaaataaaagatttagaactgcatttgagagaggttttcattcttaacatctacctctaattcttttccccttcaaagttttcttctagttgagtgagtacaaacttgcttttgtcgttgtcggttgattttggtggaatatttgtgtgagatggccaattttttgtgtgtgtcagaaaaaactatccgtgctcaaaacatttcctgttgtgaggtggttgtattcatgtgtttattccaatttttttatttctagatctctgagttactttacctacatgtgtttcaagttttcgtaaacaattttaagaactcttaaacgtcttctcagaccaaatcagaagtgtgcattttgcttagactccaactatcactaatgggaaccagaaaaataacactttaagatttacatttaaaaccagttattggtttaaagtttcattctaaaattttagtttcctttcagaatttcagttatcatagttcttcagaagtatacttatgaattggcattaacagaggataataatctataaatagactgatgaaaatttggaagttttatggtacagtgtgtcttaagggaatattgtcaaaccagcagttttctaccttggcagtttgagacatcggttattaatacttttaattttgtagaatggtttcttatattaaagtatgtttgtcttatttgacattgtcattgatggttaaagttgggaggcatcccaaatgtctgttctatgtgtttattaatataataatacacttagcatcatatataataggggtgtcatgggttttatgtgtatggtgagaaaacatgaagatctccctgatgtgtttttaagatactgggtttcagttagggtgttatcaaaggacctggatggctttgtaaacaaaaacaaatgccataattttgtattcattacacagtttaacatttatggattttggttattttgcgtaaaatgtactttttattagattatcctaatattatacttacttagtttttaatatacttgtattaatttcttataatataacaaaagtattttttccattcacccacattttgttagcatagatgtttatcagatctctgctgagcaccgtatattgcttctaatcatacagatgccttaaatattaccagcttgctctgtaagaataggctagtgctggcattttcattatcaagtgaaagtgtttatataaattatttttacctgaatgaaaaattgttaactttataatgcagttaatcaaagtttattttagaaatgaagtcattaaacctagtattaaatttgagttttaaaattaaactaccagtttgtggcctaatgagccccaaaacatgccaacattggggaaaatagatcttgttttgagctgaaaatgctatccagacctacttaactttgacctcttaaatgagagccattttattttatttacagataaaatatgctgtagcattattataggactgtttaaaaagacagccaattaaatataaattttatggaatataagtattccataaaattttggagtaaagtaggtgacaattgtaacctgaagctctttcaatcttgagttgaatttattaagaaaaatcaaccccccctagtggcggctctcacattgaaaattatctttattagtaggaaatacattttaaatgtgttcaatttaatcccactgaagtatctccaacatagtagactctcaataaatatttcctttctttttggagtaatgaaggttgggaaattaaaggctctgaagcaactttacgtccaattcatgttcctaccttcaagaagaaaatatcaaagataactttcattatagaatctactataactttgcttagactgttgccccatacttagtgaccctactcagaaaaagagaacaaatcctgtgtttattttattctctttggaaatgaaagtgtttatttattttgtctcatgaagatagtcaaaaaggccattatataattaaatagaatgtttttccctagtgataattttgtatatatttttgtatttttaaggttttaatcataaagaaaaagttgtaatggatttcagcttacctgtacatagaaagttagcactgaatgttggcaaataataggtgttgagaaaaggggatctacactttaaaatgataccagctgtagtggtgattaagccattatgaagtgtcagaactggaagtcacttctgagccttagctgatctttctttaaaatgcatactgataaaaacttttacttttattaacatattaataatataaaagcattgtcttgctattctttttaaatgtcatgaatttcatatatgtaatactgaattgtattacttacataatactcattaaatgttttctataaatttatggtgccatttttaaaatagcatctaaaataaaagaatgggtcttttcatttacacaattatttctccatcatttttctttccaatagctttagatagcatatacatagtagttatggacacttgcttattagaactatgaaatgaagtaagtgaaagtgtttagttataggtaacattaaatggcaaaaagaggaaacaggtataaattgaaagcactggatctaaactaaaaaatgaggtctagtttcttcactgttacagatctgggcaagtttcttgaccaataaagcacgacagtcagcacctgtactgctactctcacaactaaaacagaacaaaaaaaaaatatatatatatatataaactgtgaagactgctaaagatacaaatgaaacagaaacgtaaattctattcttttagcttacattatcacagaacaatcaattcgcccgtgaaacagtaagaggcagtatacgattatgttctcaattacggctacggctgaaatgtgctacttcactggtgaataaatttacatagtacgtgcttactcatgtatttaattaagacagttacttagaaataaataccatacaaatcttttacaacagtacctttctacttttatgcttcttttaaaattgatattttgctagtggcttaatatgacaaaagatgactgtttattagcacttattctgatacaagcttgcccagttctttacatcattttcttcatttttataatagtactaaagaaaggtagtattatttaagtttatagatagggaactgagattcaaattcagagttgctcagataatgagaaagagtttggatattggatcccaggtctttttgcttcaaagcttgtgttcttactgacttgtgttcgtactgtccaggtgaacagattcagtgatgcatacagtacagccatatcctagggattttcactgtttcttctcagatagtgttatggctgaaataaattatttgtcatttcccatacataatttgtacttgctcatccccatacttgtgtttttacgtcctttcctcttagagtcttttctcctgtcttattgatttgctacccacctcccttcctctttaaaacattgtttttaaaggctgcataatactctgttgtactaatattctataatttttttaactgtttttcttttgggaggaaattttattcccaaccatttaatactttaatatttcagagaatacccttgggacgtgtaaattttaatgcaaatttatttttttaggaaaaaattcctgtaagggaattttgggatagaaaagtatgtgttgttttaaggttgaaccaaatcgtacactccaagagatagtatcaaattaagaaaaatttactaattacattccatcatcaatctggggatgtgactatatctttgcatttttgcttaaaaaatattattgtcaatttcataggcaaaagtgtggttggtaattaaagttatatgttgggatcatggttatgtataggagaagcacttgtatttgcagattttctacttagggtgtcctttacgtattcatttgttttgtcttacatttttcagtcatcttttagtttgttctttttacttctttctattgaaatattgttttaaaatgtattcctattaaataatactggcagattttaaaagtcaattatatatgtggcacatcttaagtatagcatgtgaggccttatcttttgatgtcttactgtggtagttagggattttagtgctgtcttgtctcactttaacctttttcaccttcctgcatcctcccaatatattttatcacaattttggattatatacacattagtgttgtattatttttgactgtatattgtttactgtttagctaagtaatatactgtgattatatttgccttcctgttctatgctattattgatttcttttctaccatcttcctgtttattagcatctgggtttagctgtcacttaggttcatcggagacagagtttgtgtttctggctcctgcttttcttgttttggtgtggttttctggaagagaagggtagttgcagaaagctagatattctgccgtcacagaaacagaagtgtcttgcctgtatttaagacccgatttagatgccacatctccatgaactcttttgcagcacctgtgttactgagcaatatattatgcttgattttgccatgttataaaatatatttcctcctagtaggaaaaagaatgtctttaaagataggactattatttgtctttgaaactaccagagcttcccagtacagtaccatgcacttagtacatatttgagatgtactaatttaacaattaactaccacttaaaatttttttggtaatgttttagtgattctggtaaggcagatacattttatgcgggttcgagggggaataaaaatgtgtgtttgcgtagaagaagggggaggggaaacaatgagttttccaggattatggaactagtagtggtttctaggccatatttcattttcctgatcttccctgctaatgtcttgtgctagaaactatgctgtttatatctcatcatctctcctcaggtatagcaaacaaaagggaaaggaaagaactcatcacaattatagggcagcagcaggagggtggcagaagacttctgactcattaaaagtggcttccagccagaattctcagaagtttttgtagatgtttttgactcatatagggaaataaaatatccagctgtgttcagcctgacaatgaagttggggtctatttgtgctatgtgtcacctccattacattaagcacatagtttatgattgtaaatatttgaaatttatattcagagataaatacggatgcactgaagctgggggaaggaaatgaagaatgaatggggttaagagttgggctttattgggtgtaggtagtatggtagggggattttattgaggaatacttcagatttcctagctgttagatggagagtagcaccatagtgctgagaagcgggtgcccaactccaggggaatgttgaatggaagggcacagggtcaggtacagggactggaaataaagataaacaagttatgggtaagtagaccaacgcagtaagagtagattaaatcaccccgaggaaaaatccgatagagcaaactcagtactgtgagaggcaatctcttgttaaaaaacgtcactttgatctcataggattactgaaaccatatctttgcatgtcattttgaggttttataatgaatattatataaaacagttatatttatgagtaaacttggttaattttttcagctttgcttcaaacactggctacaaatgatgaacctcatagacttttttgatggagatgttaaaaaggctttcaagatagcattcagactggcattgggcatactgttgggcctgttaccaccagcagttaaagcttgcagggcttctaaacagaagcatggcatgcagtcagctggagtcttgatttcataacaattttacagattgggacaagatttttgaggtaaaggtttcaaaaaataataagttactcctttgcctgaccaacatcatacggtctatttcaggagatgtttgaactccagagctcccaaatccaatcttacagggatgtttatttatatttcaaacaggcttttccttaaataatggttagcagtgtcctttcttaaagattcgaagacaatacaaaagtaaaaatattagcgtaatccaagtcaagtgcagttaatgtaagattactctatttttaattgttctgtatatcttcaagatgtatggatagatattaaatattttaacaaaatctgtacatttctcacaaaatcagtgaaaaagtgggtcaaatgcattacctttgttagctttaacaatctgacattttaaaagcttcaaatccagtacatctgaattgttaagttctgagggtacttcttagccctgaccttaattcctctgtgtatttgactttcttcctctgtgtatttgactttcttctatgacctccaaaatattctaccctggtttttttccgtctatcatttcttctctgtgtctatgcctcttccatagccctatacctaaatgttggtattactgaggtctatcctcaagccacttttttccttttctggtacagctctcattaggaaatgtagttgttcttctgagctacaaatcgcagaaccatttgcaacctctcctcactcaatggtttcctcttccttacttcctatagtgagttagtttagttcagtgaacatttgagtctggcttaaatctctcttcaagccagtcctttcttaacctcactgtcactgcctttggtcaggttgtgatcattccttttcttggcacttttggtcagcaaacattaattgagaatccactctattatgctgggcattaaggatacaaaaatgatttaagcttacatagaaataagggtgttaggcaaacaagtataagcaattatgttacttgacaatggaaatttgctctcatgttaaatattttgtaagacacatagtaatgcattagaaatgtagacaattttgcattatgaaaagcaagcctcagaatctagtgtgaggctgaatattgcaaagagccagcacaagacaggcagcagtaccacatggagggatacctttatgttactattagttctccctgtgtcatagcatgttgccttgtttcagcgtttgtgtcactctcttctctccagtgtttcataatcattactggaaagccaccaagagtgcaggactggattgtgtacacactttctatttctgtgaagttgtttgtatggaatattccttaatggaatcattatattagacatttgtataagaagtcaaatggggcagagttgctaatccattgtgaggtaggtcagggaggacttcatgaaagtgatctacttgagcggggacttgaaaccaatgggacataacaaggaggttgtatgaaagcactaaaccacatgttgtaactgtaagtaatttcttagctctggggtagaatagacaaaagcggcttcaatagaagaaatgaagccagaggggtaaatgaagctagaaagatcatgaaggattttgtgtgctaagctaaggaacatggacagttcagagctactgaaggagtttaatcagaggagtgacacagtcagatttatgttttagaaagaagttcctggcatcccggaatcctaacttcagcgaaccctgccctgctttctgtatactctatcaccagagtcagcttggtgaaacacaggctgatcttgtaaatctcagctcaacacttaagaacagatgcctaagtccgatttctatcgttactttgctgtctcctctatcttgaacatttttgcatcagacacccacatagctcacttcattttactcatgtctgtcctgaaacatcacatcagagagaccttcctaggctgtccaaaccagcatcacgtctgtcaccccttagtttcttaccttgctttatttttcttcttagcactcaccgccctaaaagttatatgtttatttgtttatttctccatcctccacctaggatgtaagctccatgacaacaggagcttttgtatattttgtttacctgtaagtgttctgtgctgggcacttgataggtgttcagcatttgttgaaagaatgtggccccaaccatccttcttcttttctctctttcaccctgtgcctctcccttcatgtgggggaattcttacagttcactaatccttagttatgcctcttcatgaaatcctgtccctcactcaagatccatctcagataccaccttttctgtaaaatcttttttcaagcagttgctgcttctgcttagctcccataacactttttgaatagttaggagaaaagtgtttacctgggctgtacaggatgtgatggatataaataaatacttgtcagcaagttattaattaaccagtagagaattacacaatgaggtagacaagcattataggtaaagtttgaaattcagttggttaagtggagaagtgaagtaattaggtgtgacttgaaatttgtttataaatgcaatatgattaggggaaaatagctaggggaaccatcaccaatttctattatatacacagttgtacagacaacctggagaaggtatctgttgatacatacataaacacacacacacacacacacacacacacacatcattttaccgatgtattaccttttttgtagaagtatttacttttcatcttctttctgcctaaagtattacttctccacatacatcactgaaaagaaattatctagaaatgttttgattgggtcatattaatagcactatgcccaggccaatttctactttacaaaagctgatataattccatttgaattgtcaaaaatgtctttgttgtaagaaaacgctagataattactcttctggctaacaggaaggtatagaggtataaggtataaattactttagtttcccagttcagcgtgggtatctgatgatttttaaattcactttaagtgattaatgtctgctgtgaaatcctggctggggtctttgtgtgaagttattcaacttttcttttctgaactcatgttcctctttgacccataagtgtctttattctcaggtgaaaatcatgctaaattgtttagggttccgttgaactttctaattgagacacaagctacgaaagctaataattaagtataattattgtctacatgtaaaagcaaaagttgctggtaatcaccattaacctctaatatttgccaacaagaaatgtaaatagcaaaagtcaaatttattcttcttttaatatttgaggaccacattagatggctggaggaccatctgcaggtgtcagaggggctttgggacattatctctaatgagttgaaagtaaataaatacagaaagctggtgatatgaagataaatactttatttagggttgtccttgtttattgacaacgtcaatgatgctgagatgcttcctgtggaagatagcaaaggaagtatgattttcatataatttatcacaaatttctctttttaattttccaccaaacaatggctaatgcatttgagaggggaaaaaaatcccagtagatctgttaattgggaatcactgtgctacaaatgcttgaagtataagcaaacattttcctatgatgagttcataagctttttaatgaaatattcggaagaatttaacccattccctgtttttcttaagatgtgaaaggaagattttagaaagacttacgtaaactttaagtagactttaaaagtttgttgtgttagagaaatatttgaggagatgttataatgcaatagaaatttttgctttatattttttaaaggattttttatggtattttgtttgtttttcagagtaaagccaatcccagctgaaggaatcaagtcaaatccttccaagcggcatagagaccgacttaatacagagttggaccgtttggctagcctgctgcctttcccacaagatgttattaataagttggacaaactttcagttcttaggctcagcgtcagttacctgagagccaagagcttctttgatggtaagacagaagggtttaatttgtctacaataacgtataaaaaatacttgtactagatatagctgtttctgtgttaataactacaaaaattagccgtatttggaaaatttattgctgtatagtaaaatttcagtggcaaagccagatttataagtcttaaaatcaattttccagttttattcacccaacagatgcagccactgaaatgatgcatggtatcattctttgaaaatcatatatttagaagttacactcaaattgattatgtcaaattccagtttcccttctacttcaatatttaaaagtcttttttaaaaaaaaagaaaagataaaacaccatcttgctggattttctgtgttttcatagacatgtcattttatttatccctccaaacttacgtatatttctaatctttttttttttttttgaggcagacttttgctcttgttgcccaggctcgagtgcaatgacacgatcttggctcactgcaacctctgactcccgggttcaagcgattctcctgcttcagcctcccaagtagctgggattataggcgcccaccaccacgcccagctaattttttgtatttttattagagatggggtttcactatattggccaggctgctctcaaactcctgacctcaggtgatctgcccgtctcagcctcccaaagtgctgggattacaggcatgagccactgcgcctggcctatttctaatattttacattaattgtataccgactgcaagaaatataattaaaacatgtttttcactagaaagaacatttgattgtaagagtcaatagaatttgatttcattctctattgtgtcactgaaaactgtttgtcattaaccaaaccaggtagcatccccgtatctcagttttctcagcagtaaaggttggggttttgagctaggcagctggatgatatttgttacctttaaattgcaatggaagtttttgtttgcaaatgatgtttcagtgtattttctcatgtaaaattaatttttgatttatcttttatctgtctataaggcagaaatagattttttaaggaaatggtctttttaaaatatcatataattttactaaccatagcaagttaatgataaaatctcagtgggctatgtcagtcaatgcttctcatacattaatgtgcttacaaatcacatagggatcttgttaagatgcagattcttgttcagtagctttaggtgtgtccctagattttgcatgtctaacaagctccgagatgatgctgatcctgctggtctaggtcactaggaagtgcctagacaacacgtttatggatatttgactggtaatttgtgtttagaatattgcaacagttaatttccctttagatttatgtttacataatctgatgtgtttcgtctgagcatctttttattgatttgcttgcttgctctcccgtctttcttttggacaaaagctatttagtttaacagttgtggtctgggcaatatacagatttgaggatagtgatttcaggaaagattatatatttcaaagtttcatagtacacaaattttctctgacctatataaaaagtgtttgaattttcagttgcctctataccaaacccttcatcttgggagaagagttacgcagtattcagtgatggtctgtaagtatgtgtgtattagctatagtcatttagctgacatagttggaactagaactcaggtttctagattccttatattgtttttcctgaccaaataatacctacttttttctgggaaccttcgcataggaaagcactgaggattttttcctagacctgtggttcttaaaagtgtagtatccagacaggcagcatcagcatcacctgggaacttgctagaaatgcaaattattgggtccaaccctagacctgtggaatctaaggtggtgggacctttggtgatagggctagatgcatattgaagtttaggagccactgctgtagattgtaacttcaggcctcctcccagcgtcacggaatgctgtcctgatccctagcatttactcacatgctgtgcttagtgcttgaccatgtggtggcagattctgtgatgtgtaagacgtggttgccacccttagagattctggagtctagaagccaaggaggcattattctctgactctgataaagctttattgacttgagtcattttacctttccatttcttgttcctttgtaatggggaatcaaattatatatgttaaaaagaaaaaaaaagtataggtttttcctctgtttagaagtagtacatatgtgtgtatctagacagatacatataaatgtgtgtgaaacacacatatataaacagatatatttctatatttaatgtctacattatgtgtgtatgtgtgttcatgtatgtatacacacagacacatacatgattagataagtgtcctattattcagtgcttcaagtaaaggagatctcacagtctatcttataaagcatgtcatagtttaacacagggttcatcacggaattgttaaaaacttttttctcagctcttcattaatgagtttgtctgttttttattctggttcagtgtatttgacagtaggatcttattacctatttgcatgattccttcatcaactacattatcattatctttaacgttagattcttttcaaactgcattgtgcataagaattacctagaaagctttttaaaatgcaaatttggaggcatgcccctgctgataacaaggaagttctgtgtaaaacccaagaatcagtattttaacaagcatgttacggagtctgaggcagtgatttagcctagccttgattatgccctgaacaagttaatttttgtttctttgccttcagaatgacaaatgcaaacatacaaaatttaaagaagtctatgaatatttttgcttgtgttatagtggtgtacattcagcctaagcagtttcttagattgtttgatacagaaacatacagttagatggaaaatgaaaataataaggttttttttttaatccccaaatttcctccagactaccagtggtctggaaaggcaatgcaacatttcagagcacacagagaatgaaattataagggtgacccttatgaactgaaaaaatggtagatgcaaacgaagagatttgaaacatgctaacaatgattaggatttttgtgtgcagttggacccactcttccactattagggaaacagtatagcgaagcgaagggaagctcaaagtgaataacaggatgcaaacagggggtgtgtaaattcctgcggaaagaacaatataaacgagtaatcatacaatcttgttagaaaggaaactcaagttttactgtaacaatagatatttttccaagaaaatacatctatttattgcaagtttaaataatccaacttggatggatcttcttaaagtttggaaccatgactatactgctgctgctgtctgaaaagcaacactataaagttttaagtactacattaatatttatccatttctaattaattaaaacatattgaaatataactttaaaatacttgaacaaggcttagcaatttttcagttataaagtcgaaaatagtttctttgacatgatttaagcattacatttaaatatattatctctgagatggagggtattttaaaaatttaaataacaatggttacaatcaataatagtttattaatagagactaggatttgggtggttacaatctaatctttgaaactggttgatgtgaagagaaaggattgtttcctcctatatcatgtctctcaaaattgttaaacagtgtacactgggcttgttgatcaatctaatcagcattgtaatgtttcattcctaatttcagcatatctttaatacaatttttaatgagatttccttactattttttgaaatgcccattattatgtaaatattttgttcaaattattctgtttttatacagctgccccaaaattgagaattcgggaatgactacttttgttttctgtttacatacaaacacctaatgagcctgacaaaatggagcttagggatccgagtttctgatttcaaagtcttgcatttgcagctgtcatagggaatagtagtattctagttatttttaaaacaaggtaatgttagggaaaatctaagtcttgaatcattatacatgcttaaaataatcaccattttataaaatgtagaattatttacatgttaaaatattttcattcattaagcctaaaaatgctgtgggaagagaggataatagttatattatgtgatgatctaacatttatttgaccccattgtttatcatggatctttcttgactttattttaaattaaaaattacaagtgctctgttcttggtcttccttttgcagatgctttaacagttcattcccagttcattaggttttccaaagagagctattgtgtttattcatcttcagcttgtgcatttctctgaatttcagttgttttggtatctctctagatcagaacattattcttgaaaaacaagtatacgtacatgtgtatatgcaaagaacaagcttgaacaagcagtaaaaatgaagtaatgcacttctaagtgttgatgttttataaaatctaatagatttgtatgtctgctttttcattcatgagaattctataatttcatctgctttgttgtaattttaaaatttctgtgtgtcaagtaatttaccaaagtttcagtatgatagtatcatagcaaatgttatttcttaattctaggactatccaaagtaggtttgtttgcataacagtttagcacatttgaaatcaccaaataaagtatttgttgaatttgatttacccatggcattatccatcttaaatggtgatttaactgttatcttttttcctaattcacattttaaaacatgaaactctaattacaatattcatgataactttcatagctaaaactatataaacctaggttcttttaaaattttaatttatggaacccctgcagatttaaacatgaataaatacaaagaatagtagcgcattcttattgaatgaatatacaaatcctggctctcatatttaatattgtgacctctttggttcaggaatttaatctctcttttcctcagatatcccaatttacagtataagatttattagattatatgaataaattaatatgatagaactttatataggatacttttatctctgcttttgtttgctttgacaactattttgaagaacacagtgacaaatatctgagattcaaacaatctaaactcattgtatcatatattatgtattttgctgctttcctgtctcttttaaatttactgatttaatggatttctctttgatcattacctagtcttgcatggttctagaatccttgcttatttggccatgaacaggtcattagtcatcattttttttctttttagggagactaccgtgggctaacattaaaatcaccaactttcagcaattttccttttttagaaaattttcaaatacagacatttaaaaatctgtagttaagtcttaagatatttcgtgagggtttgtgatctggttaatggaaatgtacaccttcatgttatagtgttttataaaacatattcatatataatattaattatattaaaatctgaagaaatttttatttggtaatatttgtatattatttttaaatcttgctcttacagccttttgacttttcaatcaatgaattttaatgagtaactcaaattcgtttatttgcttatggctggagatttagattttagagtcattttatcgtcagaataacattttaagccattaaagtgaataaaatattccagggggagaacatgtagaataagaggaaaagtaccaaagataagatgttttaaggatgagcaggggtagtaaaaagtgaaatctgtggagtatgaaagtatgctaaggtgatagagttgacttaagatactttcatttgatgtgttcttaaattggagagccagagagaaaactgtacatgaaagtgaaaactgaaatgaaatgaaagtgtaaactgaaatgaaatgaaagtgtaaactgaaatgcaatgaaagtgtgtacagaaaaataataacactagagaaggtgatttctgttccttgtttgtccatagaggccaaaaagccattcagttgttagcagtgggagattaagagggagacaaatgtctgggctctgtggctcatgcctgtaatcccagcattttgagaagccaaagcaggaggactgcttgaaagcaggagttcgagaccagccaggacaacgtagtgagacctcgtctccatacaaaataaaaaattagctgggcttggtggtgtacttctgtatcccagttattcgtgacactgaggtgggaagatatcttgagcccaggatgtcaaggctgcattgagccatgatcgtgccactgaacttcaggagtgagactgtttcacacacacacaaaagacggagacaagtagtctgatgggattggttgacataaagaaccttaatgaattgtacctactgaattcttcatgtattttctagcctgaaattttctcatacaattgtcatatttacagagcattctgttgtcagctggatttttttttatcgtgtctaatttctgtgttatggagacatttcatctctttatctcagcatggtagagggaggttgtgttttgtgattaaagcactgacagcaggagctgtggatgctagttcagttaacgaatcttgtgttttttgatagactttaacctcactgttccacagggtcttcatcttctcagcatgtttgataaagatgcttgcttgccctgatatattaggtttgtagtaaattctaaaaatgagagatctgtgaaaaatttttataattaaaattgttactgttatggaaatcatagttatttcctgcagaatcctgatatttcacttgttttagtggagaattttgtttttttttttttttttgaatatgcataagggcctttacggacctggtattaatatcaattgagaatccctttgtttaattaatttcatattttttatttagagatggaaatttgttaataaactgtttttccccttttgatataatacataataatttacttacatatactgttttcttttatcgaaagtggcacatattccaaatctggacacttggaaaagtgtgatagcttgctttggtgaggatagaaattttgggcattgtatgctacttgctttattgggatacatgtcaaattttctgttattgcgctatgtcttaagataggtgcttcagcttttgtgtttgtaaaattgttattatttcccgaagaagttcacaataataactgtgctgaacagcatggaatgataattttaagaagtatgagggaattcaatccagaacatacgtgagttatttcctaaatcctgaggttctaagtctctgtttctcaaagaatggcacctcattctcagcatcactggggaacttgttacctatgcaaactgtaaagccctatcctagacctactgaatcagaaattctagaggtgtggctaagcattgtattttaagccttccaggtgattctaatgtctgtgaaagcttaaggatcactgccctcattgagtatttacattatgttacttaaaatgcaatttaaatactactcttgtatatatgaaaagctaagtgcaactcattccccactgaaaaggtcaattaactgctcttgttccattaatgcagagatttgtcatatagttatagaggaattgtataaaactgagtgcgtaccaatgagtaactggaagaatgttaaacatctttggaagtcagtttttatgtaagagtttggatagaacaaacttttaaggactaccctgccaaagtagtaaaggggatggtaaatattatgaaattaattgaatttatagcagcagttagggactaaaaggggatatgctttccctggcaagatcatctttctgtttaaatgcaaactatagtaacaaaatacaaaatatagtttaccactattcggtattcctcatgaatttttttttccttgaccaattcaaagcatgtgatatgaagagatgtggcatttagggagtaggggaaatctgagcttagatgtctaaggaaggaaagtaccgtattaggaaacatggatatggttaaatgcatgtgggaataaaacttgagtcatctgtggtatgaccatttgataatgctgtgatgtatttgcactctaaattccatcatttgttagattaaattcttatttgtattgtacgactccttcatagatctttcaatgaggaaatagtggaaatattttggtggtttactatcttaacattctactgaatgttcagagtctgattctcacactttggaaagtggtacatatcctcactgatggggaagattttaacaaatgcccattacggtacagcagatacttcccagctggtgacctattttcagatactacattttgtttctgtggactgtcataaatttaattccagtggtgtaatatttaaagtgtcgttatgcatataatttatgtaacaatttacagttttgaagtatagttgacccttgaacaatgcattaataacatgaacagccgattaatgtgtcttttgtatatgtattatatactgtattcttaaagtaggccagagaaaagaaaatgttattaagaaaatcataaggaagagaaaatatatttactgttcattaagtggagtggatcatcatacaggtcttcatcctcattgtcttcatgttgagtaggctgaggaagggttggtcttgctggcttgggagtggcagaggcatgtaagtggacttgcatagttcaaacccatgttgttcaagggtcagctgtactttcaaatgtgtcatatagttaccatagtaatcctattagatactaattactgctttccacttaaagatgataaaaatactcagttacctccttaggggcactttaattgtaagtttctcatcatggtttgagggtgtataaagtcagcatagacttcgttacctctgtccttgattgtcagtgattgattccaggcattaccctggtattgtacatgttattttaatcctcacaagaatttgtctcaagaggtagcattgtcctcatttaaagatgaggaaactaaaggtcaaaggtagttagcaaagtgggcggtggctaataatagctcacacactgaggtctggctacctgagtttttgtctaagctctgccacttaaatctctatgactctgaacattttctcaatctccttaagtctcacctttctaatatattgaaataacagtgtcagtctcatagaactattatgaagattaaataggatataatacgtggaaagtgctaggtgtacagtgtgtgcccaatatcacatatgagtactaagtaaggtcactccaatggtaggaagcagctcttgtgacagtgtctcatgtcactttcttactcattgttttctttctaatcagcacaagcaatatatacatgaaaatgagtagtattgatagagcctctagtaatttactaagttagaggtagtaggcatgagagcaagaaatagaagaaaaacttcatgcaggggtagacattacatagtttaggctgaaaggccatgacataaaatgtttcctgaaaaagcacagcagtgtttttttaaatgattttaaaagtccacccttctcagactcatctttgcacaatatttacttcaattatttaccagtgattaaccttaaacacaagagcaacagaaatatttgcatatttgtttttggtagaaacctccagtgatcattccgccaaatgaacttgtcacttttcctacttatgtagtagttacacatattatctatcatccttccaacatttggaattataagcattgttgtttagaaagaatttgttctttttattttttctctacttcaagttcctgtaatactttaattaaaccctattctggtacttagtatttttgacattgttttctagttatttccatagcttatatcccctacttaaagacagggtctgactcaagtgtctaattacattggctaatactcccagtacaagcccaagaacaaattataaattactctaagatgaatggtctctttcattgcttagtcatcttctcagtgatcaagtagttatctcttaatatttatgtttttctactgccagtgactctaggtggaactaatatcaattgtgttgattaaatattaattttaagagattccaaacaataatttagatatataaagtctgacactgttattgtccgtttttaggcttatttcataatgtaagggtttggctttgttgttttctttttaaaagcaagtgttactgatgcttcataccagagcttttagaaaagtaacagaatatagttgactctgacgttgtatggttttagtgcattcaagcaaatgtggccattagtaagcaagcaacaacataacttaccgaatagaaagggagaaaaggccattctctcttctgccattctctctgtgtacagattaaacatttcctttggtcttgatgaactgttaggtcagtttacctcaaactgttttttggcctaaggaaatctgttctctggccttttgaagttacattcagagaccgtgcttttggctgtttcttgcaaagagatatgttttaacttctgcaaaggccagaatggcatgagattctggtgtgacacattcactgatgatttaccagaaaatacactgcaaatatgaaagactgcagacaggttttatatgtggaactctgctcagactgagagaaagtctagttattagtaaatctctagttttttcagagctggattattttgtcacataaaaatatagtgagataaatgttaagaggactgccagagtcagttttatttaatggtttctcttattcaaatatcacaggttaaaagaaggtcagaaagtggcaagtatctaaaagattatgctttataaccaagcaatccataagctctgagaaatatttctactaattacagctactgtttgttgaacagtattgatccactatgtgtcagaaactttacatatattctcattactcttcacaacagccctgcaagatgtgctttaaaatttttttttttaattaccacctcacatattaggagacaggctcaaataactcccacttttagtaaatgtcagaggtaaggtttgagcccaattctgtcagttaccaatatccacatgcttttaagtgagataatatttgaaagtgcttggcaaaatgtttaagtggtagctgttattatttctattcagctgcgcttcctcccagactataaatacatacataccacacacatacacacacacacacacacacacacagtgaggaaaaaaaagaagagatagcattataacatgacacctccaatagtaagcatcctatcatgccatcagactttccttcacatatataatccacaagcagttaaaagctataccggaaaagccactttacaagatgtaatacctaggagtaaatataaagatacctgtgcacatcttttttgtagacaactttaaaacattctagcaggacaaaatatagacttgaacaaatggaaagaaatgtatgttcttggatagaatgattcaagattataaagacattaattctccatgagttaatttataaatttaacatgaacctattaaatagtcacagtaattaacagtttttacccaaatgctggacaagaagattccaaacatcagaaatccatctctcaataaggtgtatagttgctttttttctcctcaccaccaccagttccctaatatttcaataaatacataaaaatgttggattcatttttataggttacattatggagaactttagtctcctaagaaaggaggtaggagtggagaggagtgtttgtaacagtgttgtgcagttctttgaaactcctaagttttgtgacaaaattatatcgtgaactcatcaaaaattatttttaacaatctgtcagctgacaacttgactaaacccttcagttttgttactagcatagaataaggagctacccactggcaacaggattacttacctagtatttattatttaccttgttttagccaaatactaaaaataccagtggatgccagtatttcaaattgtctttgtttggtgttcagaagttttctattatagctctttactcttgcttacttttaaaatcattgtttttcctttttttccatagttgcattaaaatcctcccctactgaaagaaacggaggccaggataactgtagagcagcaaatttcagagaaggcctgaacttacaagaaggagaattcttattacaggtaaattttagtaaatatagtttcttacactaaggacagttgtaaatggaaaatgaattaataagtcttttagtaattccctgtttacttaggatttgctcaatgttttttgccactttcatctgaactgcgatagtgaatgatgcttaatacatgaaaaactggaattatagtcatgcaccatataatgatgtttcagttaacaacagaccacatatgcgacagtggtcccgtaagattataccatattttttactgtaatttttctagtttagatacaaaaatgcttaccatgtgttaaaattgcctacagtattcagtatagtaacatgctgtacaggtctgtagccttggagcaataagttatactgtatagcgtaagtgtatggtagactataccatctaggtttgtgtaagtacactctatgatgtttgcatgatgatgaaaatcacctaaccacatatttctttgaatgtgtccctgttaagtaatgcatgactgtatatgaagtagattagttagaagaccggtcaaccccttctgttgtattaatatttcttcaaacagcaagaactcctagagtattttagaggttctaatttaagatgttgaatttatatatatttttatggaatgtatctctattaaaattgttaaatgcatttcttaaatagtttaaaatagttcttaacccaaatttcattttgccaatatgttataacttacattttattttagcaactgtttgtgacttattaacatactaaagattttctcaacaactccaatccctatttttatgcttcagaatttagtttctaatttgtctatgaaagcattttgcatctttttttactcttttttttagaattgatgccatgattgattctcacttaaaattctcagatacttattttgttgaaaaaagatagaataaagatgtgtgccatgtgtgctgtcaccgctatgtgatcattatcagtttcacccactgaactgactagaaaaacttcaccattgttacaaaaagtaaccctaagtttcggtaactccactagttcattcagtggatggtgatgtgcctaataatataacatttttattacaattgtgtaatcacattcaaagtcctgttagcaaaaattaacttatgttaaacaaagtaaatctattaaagcatgagtcctcccctagccccaactgaggatcttcatgtatatgtaaacccaaacataaagactccttattcaggtcataggaaagcattttaataattgctatttaagatgattaaacacacctcttgggttttctactaagggcctaatgaaatcccgtatttcaggtgaaatagacagatatgtactgattgacgtaacacttggcaagttggtttaaattatgggccatttttatttttttcccaaaacatttaggcaaattgtgtacataccctatgtcagggaaacagaataacaataatatgaatgcaaagctgtaaagctataattatatggaatatatatattttaaattatctgcaaattggtaacccttaagaagttaaaataaacttacctgtttatattgaataccatttgtagattgctcttttaataggaagactcacattctctatgattttcttaggattgtgcttatatgttatctttttatgaagaagatgactaaaaacattatagatatgtggaaatggctgtttgattataacaattgcataatgacatctgactttatattgcaaccgacggttatcagccaattaccactacagtgtgaaaggtgttaccagaggttctgtataccatatggcctaaaacttttgaggagaaatattttcctttgcttaacaaaggcatatgaagaaaatgttacaaaaatttttattaaaggccaggtgcggtggctcacgcctgtgatcccagcactttgggaggccaaggcgggcagatcacgaggtcaggagttcaagaccagcctggccaacatagggaaaccccatctctactaaaaatacaaaaaattagctgggtgtggtggcgggtgcctgtaatcctagatacccaggaggctgaggcccgagaatcgcttgaagccaggaggcagtagttgcagtgagcagagatcacaccactgcactccagcccgggtgacaatgcgagactccatctgaaaaaaaaaaaaaatttattaaaagtttaagacatctttctaggttagcttcaatttattactattttacaaggaataaaaatgaaacaatgtgaataactgtgtctttatttacttcacatgtttatttcataagtttaaaatatatctcttgctatttaatactgtattgttaaaatcttgcagctttgtttttcagtgacaggagttgaaattttatataacagtattgcagtttctctgaaataataagtgagcttaacaaaattttcagataggttgagtgaatctttgtgactaaaagaatgatgatctcttttatttaattagcatattaattccttctgttaatttattgagagaaatcaatacaagtaataaccttgggtctcctggtacttgagatcatttgagatatataaaaattgatgtgcatctatcgtttctagatttttatttctgataataacatttgtctaaagagatttgataactgtacttaaattatccttctgtcttctggcatgtacaccaatgagtttattggaatgtgactaaatttgtttcactgtttgaaaaagtatgatgttctacaaaataatatgaatgtgatcaatggataatcttccctagaagcagatattttcaggatgaatcagtgcaatgacggatatatagtgttactgccaagagaatttaagaatatccaattttgaatgtgttagtcattaactattcaagttcttatgggtagaatcaccattgtttatcctaagagaattgccaggtattacatatcatatttgcagtcaaaaacctgagagcctgcttgtggttaaagggacatggatggagccggaggccattatccttagcaagctaccacaggaacagaaaaaccaaataccacatgttctcccttataagtgagagctaaatgatgagaacacatggacacacagaggggaacaacacacactggggccgtttagaggctgcagggtgggaggagggagagaggatcaggaaaaataactgataagtactaggcttaatacctgggtgatgaaataatctgtacaacaaaccctcatgacacaagtttacctatgtaacaaacctgcacttgtaccactgaacttaaaagtaaaaaaatagaacaaaacagtcagaaccatgcaccaatttgggatcgataacacataaaggcagcatatcatgttatttaagtgagtacgctttggagccagactgaatttatctcctggatcagccattttctggctatgtgaccttgggcaagttacttttaaaggtatagtccttgacctcagtttcttctattgtaaaactggaacatggcacttacctcattgggtttttgggagaagaaaccactcaaatacataaaaacatttagaaaaaggaatactaaataatagttgttatctttgtagtcaagttcttagaagtataatatagatcaagaatcttgaaggtggaaagtaattggagtggaaagagagacagtcactgtatttcatttatttcatctgataatgaagatatcgactggactatatgtgagcagcataagcactagggcaaagacttgttaactcttaaatcccagtacttagcatacatatctcctcttgggtatgtaatagtttattacgtgttgaataaatgaatcactattatttatatagctctttatagttctcaaagcatggtgatataaatctttatttgctcatttctacaaccatataacattgtaccttattacactgagtgctggctctgtgccaagcattgagttaggtgggatatcgtcattatatctacctgatgaagtgccagtttttgaaataacactgaagcctaaaaagcagtaaatagcttaaccaaagccacacagctagtaatagacagagacaggagtccagaccaaatctgtctgactacacagtacaattcttaaactaaaccatactgtgtttctccttacatgaaaaacagggtgttagaagacattagctgtgatcacatagtaaagaatagatcaagtaccaaattgaactcaaggagaaaatagtgagggcttgtagaattaaaatatatgataataataaagtgatctatgatactattgttatccaagaggagaataaaggtattagttgatattggacttgaattatccagtaataggaaaagaaactataacatccaaactaaagagtatgggctaataaaaaataatggacccaaagtaggcaaaacagagagaaaaagaaacattatacatgtgaatgtgctgtgaacaaatagaaataacacatataaaatgataaatttaggtatgtgttcataatgacattaaattttagtggactaaattcactgtatgcttgctttacatgtgtattatagtttaattacatgtatattttatatatatagtgttttcctgtaaaagtcttaaaatgttctgtgacttaaaatgttagcatcagtgcttgaaatgtctttgtacaagaagagttttctattaatgttcccagtttaagaatctaatcaacatctttgcctcctgtttccctctaaaaaaaagcagtgtgatagactatagtgaatgatgtctagtttgttttttaaaaaatatatacaatatatttaaaagagaaaatctgaaacatgaagaagatgaattccatattctaccaaagttattctgattgagcattaaatttagccatttttccatagacaaatcaaaaggtatgaatagatatttcttagtccaggagtgtatgttttggctgtgtttgtgaaatgtgacaattttaactattttgaagagaagaattttcagagataaaagtaataacctttatctgatggtcaatattaagtcatattactaattttagaacttcctttccttgtaggctctgaatggctttgtattagttgtcactacagatgctttggtcttttatgcttcttctactatacaagattatctagggtttcagcaggtaagtatatattatttatatcatttatattattatatcatttactttttatatatatttaggacacagttggccatttgtatgtataaagtatcaatatatgctgtagaatacagtatgtatttgtagctaataattttttctaatattaataatttactgcactataattcctttaaacctttatgtgattcatggttactgtgtttcttctttcgcttatcaagaatcttatatataagaaactttcaggcacgtagggtctaggggagaagatacaaaattatttgctatcaaataacttatggatagcagaggatatatgacaactatgaaatgaatgagatgctgttaaaaagtacaagtaaaatcctatgatttatacctttaattctgatttatttggattatggaagttaccctaaatcaaatggtatgtaagctgacctaaataatgtgtaacaggtgggtggtcaagaaaacataggaatattgaagtactgtaagcattagactggaagtcattgaaggaaacagacgtgtctgacttgtttgatgttattgaatgaacagtgaatagatggaattataaatatttgatatattggaagggcaagaacatcttttatggtttgagaacagattgtaacatttgaatgcttgctattctcatatatctggttctcaaattgtactgtgcacaagaatcacctgaagaccttgataaaacttggtcatccctgtgagccccattgtcagatattctgaatcagtagttcacagtggggcccatgaatttgcatttctattaagctcacaaggctgctggtcttaataacagttatatagactagagcttcaactatattatatacccagtggaaaccactgaagggttttgttacagggggtgtgtatatttcaacttgtgtttcagatgcaacttttggaaattgtgtaatggttggcatcaagatgatttaatactagaagattaggttcctaggaagatttaagtgtagatgactaaagtagtggtatctagctactactgctaccacaaagtctaaactcctgatttcttgcattctaaagaaaatacattaatgtccatagaaaagcctgtttgaagcctaatgtattatataactgtcttaatcaggatttgatattgtgatttatattagtaagaaaatcagagagattagccattttccaatccatttttttctcgcatatacacatggatttttttcctaaaagaatattcatatctgacgcaagtggtagattaagacaccatttttaaaactgcaagttatgactcgctcatgggtatgcagtcgagacagtggatcactatcaaactgttttttagttgtttaggatagaataaaataatatagaatacacagtgttatctcatgtaataatggtaagtgttttgtgaaacttttccatgtgtttatgtctgtgcacacacctgtgacagatggaaatgtattttttatcataacttgcagttaaaaaaaaaggaaaactctggtttaagcactaaggactcagcaccgtagtaaatggtgagaggcaagagaaggaaagtgggtttaatatggtaaaggcacaatcccttgctcttgtggagtctacttggagtgaaaattttatatgaagaaaattttagagaacagtgaaggaaatacataaagaataccattaagcttagagaagtcaaagaggcctggggtggttaggaaaagctgcatggaagagataagaatctaaaaactaacaaatgaatatggaacataaacagattttaatatgttgcatttaaggaatggggatgtgacttatttgagcaagagcattcatgttgggaactgatgacaagtaacttttggcttatctgttgtagtgccagtctctttagctttttctaccttaggttctatcttaggtgactagggaattttaggaatcattcaattcgtattcatcaccactagcaagcacccactaatctaaataggctttaaaattaatttagccatattttttaatcagtccttttgttgtattccttgtatcttttttctttagtctgatgtcatacatcagagtgtatatgaacttatccataccgaagaccgagctgaatttcagcgtcagctacactgggcattaaatccttctcagtgtacagagtctggacaaggaattgaaggtaagaattgatggtacaaaaaatagtgttggtagtttttaaatatgagtctgtgaaaggaggctgggaacctgtagggtcatagaactccatgatagggaagtagtggaaagatgtaaagtctgcaatcataggccacagctaggtcacaaagagcctgatgagctaaggaatattttggcaaatgagagccatttaatgagtttcaggcaacagagtattgccatagtcagtaatgtattttataaaaataagtagtaccttcatgaaagatggaaggaaggtacaaggttgatacctgagtgcatgtaaattattgtgtttaaaatgcaccaaagaaaaaagtaagctagcatatgcaagtataaaaatgcttttctcaatgcaaaaaatgtttttggaaatttgttaaagtgttaagaaaacaaaaatgcattagaaaatatgaaaattgttgacagtgatagctcaataaaaatttaaaaaattatgcaagttctatctgataaaagtgatatttaataaacttttagtttcttgtcattagctcttttgaaaatgatttttttgtattcagaacacagactccagtttagaaactaatacaaattttacctattcaagtgcttaattttacagcaaaatggaaagtaaattttgttttgcctttatttctacagaagccactggtctcccccagacagtagtctgttataacccagaccagattcctccagaaaactctcctttaatggagaggtgcttcatatgtcgtctaaggtgtctgctggataattcatctggttttctggtaaggtacaaaattttatgatactggcttttactattgttacaataaaagcttgaggcaaatttaatttagcaaaatataattcagcagagaactattcccaaatcaggcaaccctcagaaccagagagcttcagagagctcacttaaaaacatgggctggagcatttatgaacagaaaatgcaagtgaggtacagaaatggcttgattgattacagcttgggatttgccttatttgaagatgatctgattagttggccacctgtgactgactgagactcagctatttggttacaaaagtttaattctactgttaggctttccgttagcttatatagtaaatgaagttgcaattccttggtaaggacttaaggagcagaggcatcttcagcccaaatttagtttaacattaagttatagaaaaaacaagccaattttctttggttatctttgatttcagctttaaaaatctgctaccaaataatttgataaaggaaagtaacattttaaagtaattatttctgattttgactatcttctataactcagaaaactgttctttaggatatagtaacaaaaattgagtgaaataacacgaagccttgtattttgactattttaggatttttaaggtatgagagaattatgtagcccttttttaataggaggatgcttaccatcttgggattgaatgcctgctagacagagaaattatggcctttccatatgtctcaaataactgccacatagaaaaacgattgtatattcatgattgtggaatcatcatttgataggagatgctgttttcttgttacaaagtctgaacacctgcataggagttgactgtagggaacagcttaggattcctcagagtggacttgtctgttatctcattgtatccttagctcatgttaccaagtacaggagaagaaaatacaaagtatattgtatattctttttgtgaataacaaggaatttgaaacagataatcaaatcttaaattaacattaccaagcaatgatttttgtttatgtgtttatttctgaagaggattttgctgacccagaattagaattatgctttgagacagttttcccagtgttattgctcatgaacaattagtatgtagagtcatgtcctgcataatgatgctttggtcaataacagaccatgtatatgatggtagtcccatgagatcataatggagccgaaaaatccctatcacttaatgatgtcatagcattgctcacatgttgatggtgatgctgatggaagcaaacctgtgttgccagtcatataaaaagtatagcacatacaattatatatgatacataatacttgaaaataaaacaataataaatcactatgtatttactattaatcattattttactttatttttaaatgtattatacttttaattattttattttaatcattattttagaataaggttaactgtaaaacaggctcaggcaggtccttcaggaaatattccaaaagaaggcattgttatcacaggagatgacagctccatgcatgttattgcccccgcagaccttccagtgggacaagatgtagaggtggaagataggatcattaatgatcctcaccctgtacagacctaagctaatgtgtgggtttgtgtcttagtttttaacaaaaaaagtttaaaaagtaaaaaaattaaaaattaaaaaatagaagaaagcttatagaataaggatataaagaaagaaaatgtttttgtatggctgtacactgtgtttaagtgttattacagaagagtcaaaagttaaaaatgcaaaagtttatgaagtaaaaatgttacagtaaactgtgctgggattacaggcataagccactgcacctggccaaaaggaaaatattttttataaattcagcgtagcctaagtgtatagtgtttataaactctatagtagtgtacggtaatgtctcaggccttcacattcactcaccactcactcactgactaaaccaaagcaactttcagtcctgcctaccttgtttacaataagtgctcttatacaggtataccattttttgtcttttatactgtatttttactgtatattttctatgtttagatacacaaatacttaccatcatgttacaattgctttaagtattcagtacgatagcatgctgtacaggtttgtagcctaggaacaaaaggctatactgtatagcttagatgcgtagtaagctataccatctaggtttgtgaacctaccctctgatgttcacaggataatgaaattgcctaaggacacatttcacagaacatgccccttttgttaaatgacatgtgagtgtatgtctgaggtggaatatctgtgtgcaggagggccttttcctccttgtgctgctattattttgatgtcagaaccatcccttggactggttgatattgttttaagcaattaaatatatcatgttcatgtttaagtgcctttgttttccctgtcttctaaatttcttccatatctttactcagtagggctctgcattctttatatgttttcatgatgattcattttagtgtcttaataaaattatattttgcctctatagaaaagattatgaactatgcagtatgctatgagctgtgatatagttcatgtatgcttgaaaatgaatgtttactttaggactttatcaccattcaggatatattgattgcctggtgtgcaaggagctgtgtgaggtgaaaatgatagggtaatggcaagcttggaaaatgatataggttttcatgttatgaccattaggaacaaggagtggttcacttatccctttagaatatttttcatattactctttgagatagatttaatgggcgtcccatggagagaggagtgaaggaaactaacagttctcagcttcaggaatatttatggaattatcaagaaccctagaggcagccataatggagccttttaaaaaggcactattttatattgttaattttaatgaacttttttgttgttgttgcttttttaaggcaatgaatttccaagggaagttaaagtatcttcatggacagaaaaagaaagggaaagatggatcaatacttccacctcagttggctttgtttgcgatagctactccacttcagccaccatccatacttgaaatccggaccaaaaattttatctttagaaccaaacacaaactagacttcacacctattggttgtgatgccaagtaagtgagactttttcacttttattttattggatgtacattatgtttcagtaagtctctcttagcatgtaaaacatacagtgtatgtaatattgtttattattagattggctattatcgtacattcttccagtgtagccttttacagtaaaataatttaatcaggctcacaaatcatctttttaatttttgcaatacttgtctcaaatgatgatgttcttatatattagtaaggtttattcttctgatgacatttatgttggtttgttttacatttttaaatggcacaaatgttatttgatttctagccccagaagttttagtaactttcagaaaattgtgagcaggagtctgatattaaacatttatatcatatcaaacatatcagtgcttttctcctttctaatgtgggaatgcagagaggtaattagaaaaaccttcttccctaaaaatagattataaaaacattccagatttttattaaagatgttctgttacccatacatctgctctattagattcatttttagcatactaatttccatggatttattcaggaaaagaaaataggctgaaactgaaatttgcaatcataagcaaagaagatcagtttacatggatgtgtttaatttcacatctacttatgtgaaattctaaatgtgaactaaaacatattgcagaaactagcgtaaaaccaatgaatttatcttggttatttcatttatgttaaatcttaatccattcttattttacctttttttattttaaacagaggaagaattgttttaggatatactgaagcagagctgtgcacgagaggctcaggttatcagtttattcatgcagctgatatgctttattgtgccgagtcccatatccgaagtaagttgtagttccttatgaacatgtcagaagaaaacggcatatactgttgtacatgtttcaaattcttacgtaatgtaaagtgtttaagtaaagtatatggataaacttctacttagtaacatatcattatgattaaccagggttacactctttgttcattaacttgtctacacctgccatgtagaaatattgttgtttagttattaaaaaatgaccattttggcccatgaagttttgcttgggaattttttaattacatcgttatcaattcataaatctatgttaatattgtaacaataatagtgttaataattctagtttaaaattataaagtattaggctgtaggaaaatattccctatttaaaatgaaaataattttttccccaacttatgttctctctatactttcctgtgttactagaattgtttggtacataatcttccctttaacatttaaaataataaatttaaaacaactctgaaaaactatttccatgccttttattattttttgtttaaaatttattgtctttggggataaaggaaatacatccagaactatgtcacaagagctttgttttaggaataatctttactatattgatttgggggtttgataatttaattttttaattttattttagtgattaagactggagaaagtggcatgatagttttccggcttcttacaaaaaacaaccgatggacttgggtccagtctaatgcacgcctgctttataaaaatggaagaccagattatatcattgtaactcagagaccactaacgtaagcacaaataatgtttcctgttttaacagttttgttttcataagtcctcttatgtgaaagcataaaaataattcaagcagactttagtctgtaaataaaaattgaaaagtttaattcatctagaaagaagagcacaggtgagagacattgagaagatagaattgacgaacttgattgagagctacatgtgcagagctatagaaagaataataaaactctagggttttatcttgggcatatgaaagacacatgaaaagctagtgtcattggtaaaaaagaagaaaaatataacaatgctttatttagaatatattctctaaacccagcagtgattttaagagtttcttacacatgctgcagatgagtcctttatcaaatatttgtattgcaaatgtttcctcccactctggagaattgatttttgtctgtagcttgaggtaaggattgattccccccagccattatacgtatacccaattgaccagtaacattgaaaagatgatttaccgagaaggtcattgtttcccggctgcgctgtattttgatcaggggattttgtctgtggttctctgtctggattgtgttgttctattaatagctccattagtgcagttgtctattttgtctagcattacactgtcttagttattctatctttattatatatttctatgtcagagtgtgtcattttgtttgttttgccttttttgttctccttcaagattgccttggttcttctttgccctctataattccatatacattttagaaagcagttgtctgaaaatctgttgagattttgagtgcaattaccttgaaactgtagatcatttggggagaattaacatctttttaatactgaatctttgagcccatgaacatgatgaatgtatgtatgtgtataagtacccatggaagtacatgagtatgtgtgtaccatatgtatatgagtgcatgggtatgtgtgtacctctacaaatttgtcacttctcccttgatcaatgtttctagaaggcactttttttaattagattttattagtctttattaggatccaacttttggtttattgatttttttctattttatacatttgttttcaattttaattatgtctgctcattattattttcttccttctactttctttgggtataatttatcattttttgcaacttttaaaaaatatatacttaaacatatatatcagtttccctttaagtacagcattacaaccctcatcttttgctatcttatttttattatttaattgaaaatactggctaatttgtttttatttttattcatgaattatttagaaatacagtgttactgtactttttggtgtttggggatttttctagttgcctttttatgattgacttttagcttaattccattgtagtcagaaaatattctctggatggatttcagtttttttgaaatttgtggtgacttattttatgatctaatacatggtctatgttggtaaaatatcccatgtaatcctatgaagaatacatgttctgtagtttgggagtatcttatttttatatatcagaagtctagtttgttaattgtgttcatatttgtatacatttgttgatattttatgtgcttctgttagttactaagacattttgttttcatttattactgaaggggggcatctttttacatctttctgttttttttttttttttgagatggagtctcgctctgtcgcccaggctggagtgcagtggcgggatctcggctcactgcaagctccgccacccgggttcacgccattctcctgcctcagcctcccaagtagctgggactacaggcgcccgccactacgcccggctaatttttttgtatttttagtagagatggggtttcaccgttttagccaggatggtctcaatctcctgacctcgtgatccgcccgcctcagcctcccaaagtgctgggattacaggcgtgagccaccgcgcccggccctttttacgtttttctatgacatttttcttttataaattacatttgtatcatttacctgtttttctgttgagttgtttgcctctctctcagactctattggagctctttattatggatatgaaattttataagtatattaaattataaatacattatgttacaaatattttctttaaaaattctattgcccgaggcgggcggatcacgaggtcaggagatcgagaccatcctggctaacacggtgaaaccccgtctctactaaaaatacaaaaaattagccgggcgttgtagcgggcgcctgtagtcccagctactcgggaggctgaggcaggagaatggcgtgaacccgggaggcggagcttgcagtgagccgagatcgcgccactgcactccagcctgggcgacagagcgagactccgtctcaaaaaaaaaaaaaaaaatctattgcaaaaatacaaatactttaatattaagtaattttcatattattatgccaatctgtctttatagctgctgggttttattatagaggttagttgtttcagattcttaactttctaattcctaatttttttatttttttattattattatttttgagacaggatcttactctgtcacctatgctggaatgcagtggcacaaatgtggctcactgaagccttaacctccaggctcaggcagtcctcctgcctcagactccagagtagctgaagactgtaggcatgtgccaccatgcccagctagtttttatttttttgtagaggtgagggtcttgccatgttgcccaggtttgtctcaaaatcctgggctcaagcaattcacacacatcagcctcccaaagtgctgcaattacaggcatgcaccaccatgcctggcccctaaattctcgtagtctgtttttatgtgtagatatttattccacacaaatttattatttttttctttttttgcagggtgtcaggtagggatgtaacctgaccatggaattaactaagttattttttaaaaattaaatcatttaaatatgcttgtctgaaaaacaattttatagcaccagtcatgagaataattgaggtgaaaataaaatatgtccctttctgaattcaattacaatgtattttgctttatgtttttcttttttaaattatttttattttaaaatgtttgatagaatttttttctaagacttttttgtacacaattttagagatgaggaaggaacagagcatttacgaaaacgaaatacgaagttgccttttatgtttaccactggagaagctgtgttgtatgaggcaaccaacccttttcctgccataatggatcccttaccactaaggactaaaaatggcactagtggaaaagactctgctaccacatccactctaagcaaggactctctcaatcctagttccctcctggctgccatgatgcaacaagatgagtctatttatctctatcctgcttcaagtacttcaagtactgcaccttttgaaaacaactttttcaacgaatctatgaatgaatgcagaaattggcaagataatactgcaccgatgggaaatgatactatcctgaaacatgagcaaattgaccagcctcaggatgtgaactcatttgctggaggtcacccagggctctttcaagatagtaaaaacagtgacttgtacagcataatgaaaaacctaggcattgattttgaagacatcagacacatgcagaatgaaaaatttttcagaaatgatttttctggtgaggttgacttcagagacattgacttaacggatgaaatcctgacgtatgtccaagattctttaagtaagtctcccttcataccttcagattatcaacagcaacagtccttggctctgaactcaagctgtatggtacaggaacacctacatctagaacagcaacagcaacatcaccaaaagcaagtagtagtggagccacagcaacagctgtgtcagaagatgaagcacatgcaagttaatggcatgtttgaaaattggaactctaaccaattcgtgcctttcaattgtccacagcaagacccacaacaatataatgtctttacagacttacatgggatcagtcaagagttcccctacaaatctgaaatggattctatgccttatacacagaactttatttcctgtaatcagcctgtattaccacaacattccaaatgtacagagctggactaccctatggggagttttgaaccatccccataccccactacttctagtttagaagattttgtcacttgtttacaacttcctgaaaaccaaaagcatggattaaatccacagtcagccataataactcctcagacatgttatgctggggccgtgtcgatgtatcagtgccagccagaacctcagcacacccacgtgggtcagatgcagtacaatccagtactgccaggccaacaggcatttttaaacaaggtaagggtgttatcaaactgaattaaatctttcagtgattctttttaccttatagacatgttacacattttttatgtcagctgattttaatcggttatctacagcattcatggagacagcattttttattatatctgtgactaccttttttttttttacaagcctgtactttttccagtatgttactaatatatcattcacctgattcatgagggagaaagatatcaaggaatgaagcaacatgaatgtgtccttaatataagatgacctaaattaccaggtgaaattagtttttagaagtattttgtttaaaatagataatttggtttattctttctggattctttaaaaattatatggctatttaaaaattcaagctttaaaaaacgtattgcaatttttaagaataatttcttcaaagctctatttttttatatatgtttgaaattgagttaaactcaaatttaagtgtgctttcttacaatgcctctgaaaccctagattaattatatccctggaattcagtcctaggcacctccatgttctctagctattcctccacattacctcccctatcctcatctcatcctttaaggtagaatggctttcttttctggctttcttaaaagaggtaactcagctggctttctgtcatggaaatcaagcttgatagtgcatttttgttgtttaaatgtgtcatcagaatccgtctggcagtgagcacactttaaatctaaaaatgatcacttaaaaaaaaaaagttaacataatgtcagtaactgctgtctctggccactcaggaatacatcatgtttgcatttatgctttttccattagaaaatatttagttcattttaaagtatatttaagtttagttttaaagaatatcttgactaaaattaagctccttgacccctgtttactctgtattagagtataataattaaaagtatgacctgaagctttatctttaattgtattttctggctttttcatacattttgcttgtctaatcgtatatgagctttttaatagaaaaggacagtgaaaatttttcttattccttacatccttcaattatattaaaattgaataatattcagttatagtccgtctcacaaaattgctatgaaagtatattttactcttgagtaaagcaaattgtacagaagttaattctgtaaaattacattttgaataaggagttgcatgagtaccacataagttctttgcagtgttttcccctcactacttttcactgcttctttgtaaataaccaaataattctatagacctacatatgttccagagtacatgttattgagctaagacactcaatattgagccactgagtagctgttcagcacttgaaatgtggctagtccaaattgagatgtgctgtgtgaagtacacattggatttttggattttgaagacttggcttgaaaaaagaatgtaaaatatctcatcttttattattgatttcatgttgaaatgattagttttttcagtagccgcattacaaaagtaaaaagaaacaggtaaaattaactttagaaatgtattttatttaatctactgtagccaaaaatttaagttctgtatgtggctcacattatatttctattggattacactgctgtgtacagtatgtttaaagagaatggtgacatgaattgtgttatgagtaatgagaaaaaatcattttaaactcaccattatctggccaggtaatactaactttttatttaaagaatttacagtgttgccattcattgaagatacaggttatatgatttttactatagattttatatatgttttggaggatctgtgaagtaattaacattttgattactgaagccagttatgtaggctttacaaaggtagattttatttgaagcaattaaggatatgattttaatctgttttaaagtttccagaacgtccactaactaaaatataaaggctctgtaatctataaaactctacagagctatacatcttcatgtccttcctttttatttttcttttttctactagcagttatagaaaccagattcattgcagtgtaagaaaacaagacagagcattttcttttggtaacttgattctgtaattagaactatgctttcagtagtattcattaattaaaagtatattatgaataagaaatcggttaagaaaatcatacctgtggtgtaatattttaggaatatttagaaacatttagaaaatcagaagctgccttttttggaaaagttttgcattccagtgtaagattcctgaatataatcaattcattgatacctataacttcaaacctggtcaaagcaaacctacttatgatagagaatatttaactgtaatttgtgacttgtgctgtttgacccatcaattcctacctgacccaaaggcaatctgaaatgagacagctgcatcactcatctgtaccatgttcaaaatttcctgtcaaattaatggaaaaacaggttataaatgcaactaatacataatatgtcctcagtatgtcttcactgtgtgaaagatttaaaatttagcaacagtaaaggaacttgaagtttacaactctcaggggtaagattttaaaaatacatgttaatgttatttactggcttaagatacttggaagatctattccaataagttgcatcaccatttttgttttcagtttcagaatggagttttaaatgaaacatatccagctgaattaaataacataaataacactcagactaccacacatcttcagccacttcatcatccgtcagaagccagaccttttcctgatttgacatccagtggattcctgtaattccaagcccaattttgaccctggtttttggattaaattagtttgtgaaggattatggaaaaataaaactgtcactgttggacgtcagcaagttcacatggaggcattgatgcatgctattcacaattattccaaaccaaattttaatttttgcttttagaaaagggagtttaaaaatggtatcaaaattacatatactacagtcaagatagaaagggtgctgccacggagtggtgaggtaccgtctacatttcacattattctgggcaccacaaaatatacaaaactttatcagggaaactaagattcttttaaattagaaaatattctctatttgaattatttctgtcacagtaaaaataaaatactttgagttttgagctactggattcttattagttccccaaatacaaagttagagaactaaactagtttttcctatcatgttaacctctgcttttatctcagatgttaaaataaatggtttggtgctttttataaaaagataatctcagtgctttcctccttcactgtttcatctaagtgcctcacatttttttctacctataacactctaggatgtatattttatataaagtattctttttcttttttaaattaatatctttctgcacacaaatattatttgtgtttcctaaatccaaccattttcattaattcaggcatattttaactccactgcttacctactttcttcaggtaaagggcaaataatgatcgaaaaaataattatttattacataatttagttgtttctagactataaatgttgctatgtgccttatgttgaaaaaatttaaaagtaaaatgtctttccaaattatttcttaattattataaaaatattaagacaatagcacttaaattcctcaacagtgttttcagaagaaataaatataccactctttacctttattgatatctccatgatgatagttgaatgttgcaatgtgaaaaatctgctgttaactgcaaccttgtttattaaattgcaagaagctttatttctagctttttaattaagcaaagcacccatttcaatgtgtataaattgtctttaaaaactgttttagacctataatccttgataatatattgtgttgactttataaatttcgcttcttagaacagtggaaactatgtgtttttctcatatttgaggagtgttaagattgcagatagcaaggtttggtgcaaagtattgtaatgagtgaattgaatggtgcattgtatagatataatgaacaaaattatttgtaagatatttgcagtttttcattttaaaaagtccataccttatatatgcacttaatttgttggggctttacatactttatcaatgtgtctttctaagaaatcaagtaatgaatccaactgcttaaagttggtattaataaaaagacaaccacatagttcgtttaccttcaaactttaggtttttttaatgatatactgatcttcattaccaataggcaaattaatcaccctaccaactttactgtcctaacatggtttaaaagaaaaaatgacaccatcttttattcttttttttttttttttttgagagagagtcttactctgccgcccaaactggagtgcagtggcacaatcttggctcactgcaacctctacctcctgggttcaagtgattctcttgcctcagcctcccgagttgctgggattacaggcatgtgccaccatgcccagctaatttttgtatttttagtagaaacgggtttcaccatgttggccagactggtctcaaactcctgacctcaggtgagcctcccaccttggcctcccaaagtgctgggattacaggcgtgagccactgcattcagctcttcttttctttagatatgagagctgaagagcttagacacattttgcatgtattatttgaaaatctgatggaatcccaaactgagatgtattaaaatacaatttttggccgggtgcagtggctcacgcctgtaatcccagcacttggggagggcgaggagggtggatcacgaggtcaagagatggagaccatcctgaccaacatggtgaaaccctgtctctactaaaaatacagaaattagctgggcatggtggcgtgagcctgtagtcctagctactcaggaggctgaggcaggagaatagcctgaacctgggaatcggaggttgcagagccaagatcgccccactgcactccagcctggcaatagaccgagactccgtctccaaaaaaaaaaaaaatacaatttttatttcttttactttttttagtaagttaatgtatataaaaatggcttcggacaaaatatctctgagttctgtgtattttcagtcaaaactttaaacctgtagaatcaatttaagtgttggaaaaaatttgtctgaaacatttcataatttgtttccagcatgaggtatctaaggatttagaccagaggtctagattaatactctatttttacatttaaaccttttattataagtcttacataaaccatttttgttactctcttccacatgttactggataaattgtttagtggaaaataggctttttaatcatgaatatgatgacaatcagttatacagttataaaattaaaagtttgaaaagcaatattgtatatttttatctatataaaataactaaaatgtatctaagaataataaaatcacgttaaaccaaatacacgtttgtctgtattgttaagtgccaaacaaaggatacttagtgcactgctacattgtgggatttatttctagatgatgtgcacatctaaggatatggatgtgtctaatttagtcttttcctgtaccaggtttttcttacaatacctgaagacttaccagtattctagtgtattatgaagctttcaacattactatgcacaaactagtgtttttcgatgttactaaattttaggtaaatgctttcatggcttttttcttcaaaatgttactgcttacatatatcatgcatagatttttgcttaaagtatgatttataatatcctcattatcaaagttgtatacaataatatataataaaataacaaatatgaataatatgttttaatgtaaattctttctggtccacgtaaaggaaattatttattctgtagtattataactatgttagatgagggcaatctacaatacttagggatatgttaagtcagtaattcataaacttcttatacaattttgccccccaatgtctgacctttatctggatataaaaaacactctcagtagcttcataaattaaaatgcttctgaaatgaacttttttaaagccctgtgttatcagtgtagtagtgtgtcttagattaaaatccaaaatcctattttaatattttaagaatatttctgaagaaattcgaaataacccttgttagctgtattttgtgcttagtttagaaaaaccattgcccaaacttagtatttctgtttaataagtataaatgatacagaagcctttggccttaaattcataactgttgaacattcatggaaaaccctgcaattagaattgattgaagaagaattcctgagaaaatgttttcattcttgtgacagttatttttctattagttttatatttgttctttacaattaggcatttttctcaactagcatatcataagttagcatcatacttaattctgaacattttagactaatcctgagtctttaagaattacataaaatatttagttttaactatttgatctgaaaaaaatcaagtaaaaatcctgataacctgagtgcatctctgcttgcgcttaggtgatttctgtcaccatgaatgactctagcttgtccaatttcaccagctctaccaaacaccgacccagggatgttggccactgacagggctggatgacatctctcatttctttcactgtctgcagatgaccttgcttccgtttttactaataaaatcaaggatatcatcctaagtttgtaccttcacctcagcaattcctctatccttggacttacctccagtatgtgaggaggagagtttcctgaactccagggttagcccccgtcctctctcgttctcatgcacacagcttcgacacctgctttctgagaggctctccttctctgtaggatttcctgtgaataggtcctcctccatcctggaaaaaaattacttgaacctgcactttcttctctattaaattacttctttaccttcttcctttgtaacaacagttttgatctcctgagatctggttttgttttccatccttccattatattgcagtgttgcggttcactaaacttcttaccataggctcattttctatggccctgcaaccaaactgattacactttcaatgaacttttttcttcccttccatgacattagttgtcctgtaagctcctattatcccttttctttcctttgttaaccactctttcctcctcccacctggcagcaggcttagttttgaccatttgtggctctttctgtacatactgtctaagaagaagtgattcaatgccttacctctgattgacatttgtgaagcaattctttccctgagagagcagcatagcatagccaaactaaacacacagactctggagtcagactactaggtataaatcctggctttgccacaaataagatgtcattgagaaggtttcttactttctcttagcctaagatgccttttctgtaaactaaggctaacagtacctgcctcactggattgctggaggattcagtgatttatataaaatcacttagctgccagtagccaaaactggaataatttgagcaactaaataagtgatgatagcattagattacagcacaaagaataaagtaaatatccatgaatccatactaatataaataaaatggttgaaaaataaatgggggagaaggagcacatctttcctatagaagaatcccaaataatattggtagctactatgccctctgatgcatgagcttagttctcctcccctggaaggatgagttagacttaatgacttgctttcaaggaatagagtacagacagagaagaaaataactttacattgttgaaatctggcaagcactactttaaccaagtaatcaaggttaacatcaccagtgaaaagtcatgttgatataacatgtattatctgatatgatactttgagaagtgtacatctcaaagctccctgattttcttaaaaacacatagtctaattatgacaaaacatcaaacgcaaattcagggacattccacaaaatttctgagaggattttttaaagtgtcactgtcacagaaagagactgaataattatcacagagcagaggaggctaaggaggcatgatgactgaacttaatgtgatatctccgattgcatccttcatagaaaaagggcattactgagaatctgcagaactctaagtctagttaatagtaccacatcattgttaattttttggttttgaccaatgtaccatggctatactacgttagaggtacctggctgaagagagtaaaggaactctatatccttttgacttttctgtaaatctaaaattattccacagtagattttactttttaataaaagtacagtttttattgccacatagcaagtatctttatgtctctcattactattttcctgtatcttcacaacctcctcttagttggaggtaaagctatacattgacatcagtccccattaactactgatttgacgaatatctttttttttttaatttaagttctggggtacatgtacagaatgtgcaggtttgttacataggtatacacgtgccatggtggtgtgctgcgcccatcaacccgtgatctacattagatatttctcctaatggtatccctcccctagccccccactggtgtgtgatgttcccctccctgtgtccatgtgttctcattgttcaactcccacttatgagtgagaacatgcggtgtttagttttctgttcttgtgttagtctgctgagaatgatggtttccagcttcatccatgtccctgcaaaggacaggaactcatccttttttatggctgcatagtattccatgctgccagttttcccaacaccatttattaagtagggaatcctttccccattgcttatttttgtcaggtttgtcaaagattggatggttgtagatgtgtggtgttacttctgaggcctctgttctgttccattggtgtatatatctgttttggtaccagtaccatgctgttttggtgactgtagccttgtagtataccacattctctttatccagtctgtcattgatgggcatttgggttggttccaagtctttgctattgtgaacagtgctgcagtaaacatacgtgttcatatgtctttatagtagaatgatttataatcctttgggtatataccctggaatgggattgctgggtcaaatggtatttctagttctagatcctcgaggaatcaccacgctgtcttccacaatggttgaactaatttactctcccaccaacagtgtaaaagcattctgatttctccatatcctctccagcatctgttgcttcctgactttttaatgattgccattctaactggcatgagatggtatctcattgtggttttgatttgcatttctctaatgaccagtgatgatgagctttttttcatatgtttgttggcagcataaatgtcttcttttcagaagtgtctgttcatatccttctcccactttttgatggggttgtttgttttttttttcttatacatttgtttaagttctttgtagattctggatattagccctttgtcaaatgtataggttgcaaaaattttctcccattctgtaggctgcctgttcacgctgatgatagtttcttttgctgcgtagacgctctttagtttaattagatcccatttgtcaattttggcttttgttaccattgcttttggtgttttagtcatgaaatctttgcccatgcctatgttctgaatggtattgcctaggttttcttctagggtttttatggttttaggtcttacatttaagtctttaatccatcttgagttaatttttaaataaggtataaggaaggggtccactttcagttttctgtaccattggtgtatatatctgttttggtaccagtaccatgctgttttagttactgtagccttgtagtatggtttgaagccaggtagcatgatgcctccagctttgttctttttgcttaggactgtcttggctatgcgggctcttttttggttccatacgaaatttaaagtagttttttctaattctgtaaagaaaatcactggtagcttgatggggatagcagtgaatctataaattactttcagcagtatggccattttcacaatctttactcttcctatccatgagcatggaatgtttttccatttgtttgtgtcctctcatttccttgtgcagtggtttgcagttctccttgaaaaggtccttcacatcgcttgtaagttgtattcctaggtattttattctctttgaagcagttgtgaatgggagttcactcatgatttcactctctattattggtgtgtaggaatgcttgtgatttttgcacattgattttgtatcctgagactctgctgaagttgcttatcagcttaaggagattttgggtgagatgatggggttttctaaatatatgatcatgttatctgcaaacagagacagttttacttcctcttttcctatttgaacacactttatttatttatcttgcctgattgccctggccagaacttccaatactatgttgaataggagtggtgagagagggcatctttgtctcggcctgaaattttctttttttgttgtgtctcagccagcttttgatatcaggatgatgctggcctcataaaatgagttagggaggagtctctctttttctattgcttggaatcgtttcaaaaggaatggtaccagctcctctttgtacctctggtagaattcagctgtgaatctgtctggtcctggactttttttggttggtaggctattaattactgcctcaatttcagaacttgttattgttctattcagggattcaacttattactggtttagtcatgggagggtgtatgtgtccaggaatttatccatttcttctagattttctgttttatttgtgtagaggtgtttataatattctctgatggtagtttgtatttctgtgggatcagtggtgatatcccctttatcattttttattgcgtctatttgattcttttctcttttcttctgtattagtctggctagcggtctattttgttgatcttttcagaaaaccagctcctggcttcattgatttttagaaaggttttttgtgtctctatctctttcagttccgctctgatcttagttatttcttgtcttctgctggcttttgaatttatttgctcttgcttctctagttcttttaattgtgatgttagggtgtcaattttagatcttttctgctttctcttgtgggagcttagtgctataaatttccctctacacactgctttagctgtgtcccagatattctggtacgttgtgtctttgttctcattggtttcaaagaacatctttatttctgccttcattttgttatttacccagtagtcattcaagagcaggttgttcagtttccatgtagttgtgctgtttttagtgagtttcttaatcctgagttctaatttgattgcactgtggtctgaaagactgtttgttatgatttccgttcttttgcatttgctgaggagtgttttacttccaattatgtggtcaattttagaataagtgtgatgtagtgctgagaagaatgtatactctgttgatttggggtggagagtttgtcttgcagatgtctattaggttcgcttggtctagagctgagttcaagtcctgaatatccttgttaattttctgtcttgtttatctgtctaatattgacactggggtgttaaagtctcccagtattattgtgtgggaatctaagtctctttgtaggtctcttgctttattaatctgggtgctcctgtattgggcgcatatatatttaggatagttagctcttcttgttgcattgatccctttaccattatgtaaatgcccttgtctcttttgatcactggtggtttaaagtctgttttatcagactaggattgcaactcctgctttttttgctttccatttgcttggtaaatattactccatccctttattttgagcctatgtgtgtctttacatgtgagatggatctcctgaatatagcacacggatgggtcttgactctttatccaatttgctagcctacgtcttttaattggggcatttagcccatttacatttaaggttaatattgttatgtgtgaatttgatcctgtcattatgctgctagctggttattttgcccattacttgatgcagtttcttcacagtgtcaatggtctttacaatttggtacatttttgcagtggctggtaccagctgttcctttccatttttagtgcttccttcaggacttcttgtaaggcaggcctggtggtgacaaaatcagcatttccttgtttgtaaaggattttatttctccttcatttatgaagcttagtttggctggatatgaaattctgtgttgaaaattattttctttaagaatgttgagtattggcccccactatcttctggcttgtaggatttctgctgagagatccgctgttagtctgatgagcttccctttgtgggtatcccagcctttctctctggctgcccttaacaatttctccttcatttcaatcttgatgaatctgatgattatgtgtcttggggttgctcttcttggggagtatcttcatggtgttctctgtatttcctgaatttgaatgttggcctgtcttgctagtttggggaagttctcctggataatatactgaagagtggtttccaacttggttccattctccatgtcactttcaggtacaccaatcaaatgtagatttggtcttttcatatagtcccatatttcttggaggctttgttgattccttttcattcttttttctctaatcctgtcttcatgctttatttcattaagttgatcttcaatctctgatatcctttcttccgcttgatcaattcagctattgatacttgtgtatgcttcacaaagttctcatgctgtgtttttcagctccatcaggtcatttatgttcttctctaaactggttattctagttagcaatttgtctaaccttttttcaaggttcttagcttccttgcattgggttagaacatgctcctttagctcagaggagtttgttattacccaccttctgaagcttacttctgtcaattcatcaaactcattctccatccagttttgttccctttctggcgaggagttgtgatcctttggagtagaagaggtattctggtttttggaattttcagcctttttgcactggtttctccccatcttcatggatttatctacgtttggtctttgatgttggtggccttcggatggggtttctgtgtggacatccttttcaatgatgttgatgctcttcctctttgttagttttccttccaacagtcaggcccttctgctgcagatctgttggagtttgctggaggtccactccagaccatttgcctgggtatcaccagctgagtccgcagaacagcaaagattgttgcctgttccttcctctggaagcttcaccccaggggggcattcaccagatgccagccagagctctcctgtgtgaagtgtctgttggcccctcctggaaggtgtctccccctcaggaggcacaggggtcagggacccacttgagaaggcaatttgtcccttaccagagctcgaacactatgctcagagaactgctctcttcagagctggcaggcaggaacgtttaagtctgctgaagctgcacccacagccaccccttcccccaggtgctctgtcccaggagatgggggttttatctataagcccctgactggggctgctgcctttctttcagagatgccctgcccagagaggagggatctagagaggcagtctggctacagtggctttgctgagctgaggagggctccacccagttggaacttccccatggcttgctttacattgtgaggggaaaaccacctactcaagcctcagtaatggtgggcaccccttccccaaccaagctcaagcatcctgggtcgacttcagactgctatgctggcagtgagaatttcaagccagtggatcttagcttgctgggctccgtgggggtgggatccgctgagctagaccacttggctccctggcttcagcctcctttccaggggagtgaatggttctgtctcgctggtgttccaggtgccactggggtatgaaaaacaaacaaacaaaaaacctcctgcagctagctcagtgtctgccctaaaggctgctcagttttatgcttgaaacccagggccctggtagcgtagacacccaggggaatctccggatctgtgggttgtgaaggccatgggaaacgcatagtctctgggcgggagtgcagtgttcctcatggcacagtcccacatggcttcctttggcttggggagggagttccccgaccccttgcattttccaggtgaagtgatgccccaccctgtttcagcttgccctccatggactgcacccactttttaacctcctaaaacgttcctttcttctttgatctgctaacatcatccttatcaatggcccttcttggtttgttctcatagcttctacacatcaactataataacctatttttctgttccaactaagtacagccacacctcagagtttgagcatttgtaactgccttacctctatcaacttagtatctccttttccaatcttttcttccttgttcaactagctctgcaccctccttgtgctccttgagtatacattgttttttcatagtccagcagcctggacctcagtttcaggatttcagaaatatttttgcttatatcctggatgttctcacttattagtaactgctgatccagtccatggccctggccaaaaagactctgttttcctgatatgcagtcttgctagagaaagtcacaaaacagaaataattggcttcaccacagtcttatcatgtcagtggcagagactgacagttgcctacagagatatcttcccttccttagtaagagaaccctgacttttcactggttacattgaggaaataaaagactacattttccagcctcctttgtagatacacataactaacataacttctgcccaaatatatgaaagcaaaaattttgtataatacttccaggaaggctgcttaaagggacttaatacaactaaaatgagcaatttttgcctttctgcttttcctctttgtaaccaacacatatgtatctagagagccaccagccactttgaaccatgatgacagaagccatgaactaggatggtgaagaaaaaatagaatgagcctggtttctcttgacttggaactaccaaacagtcaatccctagtctgcctactacctctgggcttcctgtacataagagataaacagagtctctgccccaccaccacccctaggtattttcatctcactctagaatgacattatctccaacttgactgaaaacaatctgaaataatcttcagttttctactttatgcctttgtattcctttctatcaactatctcctcagattttccttacctctttttgttgcaacttctgccattaaatacatgagtttcttccctttttttttctaaaatatgttcttattatggttttcttcttctataatggcagaatatctccagtttttatatttttatttttactgttttttaattgatatataatagatgcagacattttcaaggtccatgtaataatttgatgtatttatataatcaaatcaggataattggggcatccatcatctcaaatatttatctgctctttatgctaggaacattcaaattgttctagctattttgaaatgtataatagtgttaact

SEQ ID NO: 2 - DNA, 6247 bp, Homo sapiens
agtggctggggagtcccgtcgacgctctgttccgagagcgtgccccggaccgccagctcagaacaggggcagccgtgtagccgaacggaagctgggagcagccgggactggtggcccgcgcccgagctccgcaggcgggaagcaccctggatttaggaagtcccgggagcagcgcggcggcacctccctcacccaaggggccgcggcgacggtcacggggcgcggcgccaccgtgagcgacccaggccaggattctaaatagacggcccaggctcctcctccgcccgggccgcctcacctgcgggcattgccgcgccgcctccgccggtgtagacggcacctgcgccgccttgctcgcgggtctccgcccctcgcccaccctcactgcgccaggcccaggcagctcacctgtactggcgcgggctgcggaagcctgcgtgagccgaggcgttgaggcgcggcgcccacgccactgtcccgagaggacgcaggtggagcgggcgcggcttcgcggaacccggcgccggccgccgcagtggtcccagcctacaccgggttccggggacccggccgccagtgcccggggagtagccgccgccgtcggctgggcaccatgaacagcagcagcgccaacatcacctacgccagtcgcaagcggcggaagccggtgcagaaaacagtaaagccaatcccagctgaaggaatcaagtcaaatccttccaagcggcatagagaccgacttaatacagagttggaccgtttggctagcctgctgcctttcccacaagatgttattaataagttggacaaactttcagttcttaggctcagcgtcagttacctgagagccaagagcttctttgatgttgcattaaaatcctcccctactgaaagaaacggaggccaggataactgtagagcagcaaatttcagagaaggcctgaacttacaagaaggagaattcttattacaggctctgaatggctttgtattagttgtcactacagatgctttggtcttttatgcttcttctactatacaagattatctagggtttcagcagtctgatgtcatacatcagagtgtatatgaacttatccataccgaagaccgagctgaatttcagcgtcagctacactgggcattaaatccttctcagtgtacagagtctggacaaggaattgaagaagccactggtctcccccagacagtagtctgttataacccagaccagattcctccagaaaactctcctttaatggagaggtgcttcatatgtcgtctaaggtgtctgctggataattcatctggttttctggcaatgaatttccaagggaagttaaagtatcttcatggacagaaaaagaaagggaaagatggatcaatacttccacctcagttggctttgtttgcgatagctactccacttcagccaccatccatacttgaaatccggaccaaaaattttatctttagaaccaaacacaaactagacttcacacctattggttgtgatgccaaaggaagaattgttttaggatatactgaagcagagctgtgcacgagaggctcaggttatcagtttattcatgcagctgatatgctttattgtgccgagtcccatatccgaatgattaagactggagaaagtggcatgatagttttccggcttcttacaaaaaacaaccgatggacttgggtccagtctaatgcacgcctgctttataaaaatggaagaccagattatatcattgtaactcagagaccactaacagatgaggaaggaacagagcatttacgaaaacgaaatacgaagttgccttttatgtttaccactggagaagctgtgttgtatgaggcaaccaacccttttcctgccataatggatcccttaccactaaggactaaaaatggcactagtggaaaagactctgctaccacatccactctaagcaaggactctctcaatcctagttccctcctggctgccatgatgcaacaagatgagtctatttatctctatcctgcttcaagtacttcaagtactgcaccttttgaaaacaactttttcaacgaatctatgaatgaatgcagaaattggcaagataatactgcaccgatgggaaatgatactatcctgaaacatgagcaaattgaccagcctcaggatgtgaactcatttgctggaggtcacccagggctctttcaagatagtaaaaacagtgacttgtacagcataatgaaaaacctaggcattgattttgaagacatcagacacatgcagaatgaaaaatttttcagaaatgatttttctggtgaggttgacttcagagacattgacttaacggatgaaatcctgacgtatgtccaagattctttaagtaagtctcccttcataccttcagattatcaacagcaacagtccttggctctgaactcaagctgtatggtacaggaacacctacatctagaacagcaacagcaacatcaccaaaagcaagtagtagtggagccacagcaacagctgtgtcagaagatgaagcacatgcaagttaatggcatgtttgaaaattggaactctaaccaattcgtgcctttcaattgtccacagcaagacccacaacaatataatgtctttacagacttacatgggatcagtcaagagttcccctacaaatctgaaatggattctatgccttatacacagaactttatttcctgtaatcagcctgtattaccacaacattccaaatgtacagagctggactaccctatggggagttttgaaccatccccataccccactacttctagtttagaagattttgtcacttgtttacaacttcctgaaaaccaaaagcatggattaaatccacagtcagccataataactcctcagacatgttatgctggggccgtgtcgatgtatcagtgccagccagaacctcagcacacccacgtgggtcagatgcagtacaatccagtactgccaggccaacaggcatttttaaacaagtttcagaatggagttttaaatgaaacatatccagctgaattaaataacataaataacactcagactaccacacatcttcagccacttcatcatccgtcagaagccagaccttttcctgatttgacatccagtggattcctgtaattccaagcccaattttgaccctggtttttggattaaattagtttgtgaaggattatggaaaaataaaactgtcactgttggacgtcagcaagttcacatggaggcattgatgcatgctattcacaattattccaaaccaaattttaatttttgcttttagaaaagggagtttaaaaatggtatcaaaattacatatactacagtcaagatagaaagggtgctgccacggagtggtgaggtaccgtctacatttcacattattctgggcaccacaaaatatacaaaactttatcagggaaactaagattcttttaaattagaaaatattctctatttgaattatttctgtcacagtaaaaataaaatactttgagttttgagctactggattcttattagttccccaaatacaaagttagagaactaaactagtttttcctatcatgttaacctctgcttttatctcagatgttaaaataaatggtttggtgctttttataaaaagataatctcagtgctttcctccttcactgtttcatctaagtgcctcacatttttttctacctataacactctaggatgtatattttatataaagtattctttttcttttttaaattaatatctttctgcacacaaatattatttgtgtttcctaaatccaaccattttcattaattcaggcatattttaactccactgcttacctactttcttcaggtaaagggcaaataatgatcgaaaaaataattatttattacataatttagttgtttctagactataaatgttgctatgtgccttatgttgaaaaaatttaaaagtaaaatgtctttccaaattatttcttaattattataaaaatattaagacaatagcacttaaattcctcaacagtgttttcagaagaaataaatataccactctttacctttattgatatctccatgatgatagttgaatgttgcaatgtgaaaaatctgctgttaactgcaaccttgtttattaaattgcaagaagctttatttctagctttttaattaagcaaagcacccatttcaatgtgtataaattgtctttaaaaactgttttagacctataatccttgataatatattgtgttgactttataaatttcgcttcttagaacagtggaaactatgtgtttttctcatatttgaggagtgttaagattgcagatagcaaggtttggtgcaaagtattgtaatgagtgaattgaatggtgcattgtatagatataatgaacaaaattatttgtaagatatttgcagtttttcattttaaaaagtccataccttatatatgcacttaatttgttggggctttacatactttatcaatgtgtctttctaagaaatcaagtaatgaatccaactgcttaaagttggtattaataaaaagacaaccacatagttcgtttaccttcaaactttaggtttttttaatgatatactgatcttcattaccaataggcaaattaatcaccctaccaactttactgtcctaacatggtttaaaagaaaaaatgacaccatcttttattcttttttttttttttttttgagagagagtcttactctgccgcccaaactggagtgcagtggcacaatcttggctcactgcaacctctacctcctgggttcaagtgattctcttgcctcagcctcccgagttgctgggattacaggcatgtgccaccatgcccagctaatttttgtatttttagtagaaacgggtttcaccatgttggccagactggtctcaaactcctgacctcaggtgagcctcccaccttggcctcccaaagtgctgggattacaggcgtgagccactgcattcagctcttcttttctttagatatgagagctgaagagcttagacacattttgcatgtattatttgaaaatctgatggaatcccaaactgagatgtattaaaatacaatttttggccgggtgcagtggctcacgcctgtaatcccagcacttggggagggcgaggagggtggatcacgaggtcaagagatggagaccatcctgaccaacatggtgaaaccctgtctctactaaaaatacagaaattagctgggcatggtggcgtgagcctgtagtcctagctactcaggaggctgaggcaggagaatagcctgaacctgggaatcggaggttgcagagccaagatcgccccactgcactccagcctggcaatagaccgagactccgtctccaaaaaaaaaaaaaatacaatttttatttcttttactttttttagtaagttaatgtatataaaaatggcttcggacaaaatatctctgagttctgtgtattttcagtcaaaactttaaacctgtagaatcaatttaagtgttggaaaaaatttgtctgaaacatttcataatttgtttccagcatgaggtatctaaggatttagaccagaggtctagattaatactctatttttacatttaaaccttttattataagtcttacataaaccatttttgttactctcttccacatgttactggataaattgtttagtggaaaataggctttttaatcatgaatatgatgacaatcagttatacagttataaaattaaaagtttgaaaagcaatattgtatatttttatctatataaaataactaaaatgtatctaagaataataaaatcacgttaaaccaaatacacgtttgtctgtattgttaagtgccaaacaaaggatacttagtgcactgctacattgtgggatttatttctagatgatgtgcacatctaaggatatggatgtgtctaatttagtcttttcctgtaccaggtttttcttacaatacctgaagacttaccagtattctagtgtattatgaagctttcaacattactatgcacaaactagtgtttttcgatgttactaaattttaggtaaatgctttcatggcttttttcttcaaaatgttactgcttacatatatcatgcatagatttttgcttaaagtatgatttataatatcctcattatcaaagttgtatacaataatatataataaaataacaaatatgaataat

SEQ ID NO: 3 - DNA, 601 bp, Homo sapiens
  misc_feature (301)..(301): Y = C/T
cattctgttttacaggacactccaccctcagctatatccccttgattaattatgtaaccagatctccttcatcaacttaccgattaggtaatggcaggtatttctgatgcttggtatggggtctgagtgaggagggtcctaaaaatattacttatgcagctgttttgcatagcattaaagtgaaaagctttaacttgcagtacaagttaacatttgttccagacttttttttttaaactattattttagcatgtaagccttatagacataaatcctgtctactgatacattataaagtctyagaaaagtcagtgattatatacaggaaagtagataaaggagaaatttcaaatgcataagaacaagcaaaaaggtattcgtaaggtattagaaactattagcattttagtataaataactggtgaatacagcaaaatgaataatttgtggttagtataaatcagctaaattcttgtaatgcacaactaactacacatattcttcagcccacggaggccatacaatggagatttgggattctaactttgttttcaaaatggagaagtgcagaaactttgaatcttttaaaatttatcttcca

SEQ ID NO: 4 - DNA, 643 bp, Homo sapiens
  misc_feature (307)..(307): Y = C/T
aaagctgggtgcctaatatgtatctgtcctgacctcccatggaaacaattatcaggcttcagatattttgtctctcaattttttaacttgaaagtacatggctatttatttttgcacttattttttgtttttattgtgcaatttttcaacatatggcaaagttgaaagaataccacaaatgtttgtatacctttcataattgtgtatatgtgtatgtgtgtgtatatatatatgtatatatgtatatatatatatgtatatatgtgtatatatatatatgtgtgtatatatatatatatatatatayatatatatatatgaatgttgcagcatgcatttcctgagaataaggatcttctctttattctagaggtatatacctctacaggtgatagaggtatataaccacaatacctctatcacctgtaaaatcccgattccaggacacaacatagataaattaaataaaaatttttgtagtggagccaaggatccgtaatttttacagttctcaagtgactacaatatgcaacaaatgttgagaaccactgtccacacattaattaaatttgttaaatattttcagtaaagaatacattttgtttcttaatatgaataagaatgatagccttttaaagtttag

SEQ ID NO: 5 - DNA, 579 bp, Homo sapiens
  misc_feature (145)..(145): M = A/C
atcaaatggtcataccacagatgactcaagttttattcccacatgcatttaaccatatccatgtttcctaatacggtactttccttccttagacatctaagctcagatttcccctactccctaaatgccacatctcttcatatcmcatgctttgaattggtcaaggaaaaaaaaattcatgaggaataccgaatagtggtaaactatattttgtattttgttactatagtttgcatttaaacagaaagatgatcttgccagggaaagcatatccccttttagtccctaactgctgctataaattcaattaatttcataatatttaccatcccctttactactttggcagggtagtccttaaaagtttgttctatccaaactcttacataaaaactgacttccaaagatgtttaacattcttccagttactcattggtacgcactcagttttatacaattcctctataactatatgacaaatctctgcattaatggaacaagagcagttaattgaccttttcagtggggaatgagttgcacttagcttttcatatatacaagagtagtatttaaattgca

SEQ ID NO: 6 - DNA, 801 bp, Homo sapiens
  misc_feature (401)..(401): Y = C/T
ccaccaaacaatggctaatgcatttgagaggggaaaaaaatcccagtagatctgttaattgggaatcactgtgctacaaatgcttgaagtataagcaaacattttcctatgatgagttcataagctttttaatgaaatattcggaagaatttaacccattccctgtttttcttaagatgtgaaaggaagattttagaaagacttacgtaaactttaagtagactttaaaagtttgttgtgttagagaaatatttgaggagatgttataatgcaatagaaatttttgctttatattttttaaaggattttttatggtattttgtttgtttttcagagtaaagccaatcccagctgaaggaatcaagtcaaatccttccaagcggcatagagaccgacttaayacagagttggaccgtttggctagcctgctgcctttcccacaagatgttattaataagttggacaaactttcagttcttaggctcagcgtcagttacctgagagccaagagcttctttgatggtaagacagaagggtttaatttgtctacaataacgtataaaaaatacttgtactagatatagctgtttctgtgttaataactacaaaaattagccgtatttggaaaatttattgctgtatagtaaaatttcagtggcaaagccagatttataagtcttaaaatcaattttccagttttattcacccaacagatgcagccactgaaatgatgcatggtatcattctttgaaaatcatatatttagaagttacactcaaattgattatgtcaaattccagt

SEQ ID NO: 7 - DNA, 601 bp, Homo sapiens
  misc_feature (301)..(301): R = A/G
gttccctcctggctgccatgatgcaacaagatgagtctatttatctctatcctgcttcaagtacttcaagtactgcaccttttgaaaacaactttttcaacgaatctatgaatgaatgcagaaattggcaagataatactgcaccgatgggaaatgatactatcctgaaacatgagcaaattgaccagcctcaggatgtgaactcatttgctggaggtcacccagggctctttcaagatagtaaaaacagtgacttgtacagcataatgaaaaacctaggcattgattttgaagacatcaracacatgcagaatgaaaaatttttcagaaatgatttttctggtgaggttgacttcagagacattgacttaacggatgaaatcctgacgtatgtccaagattctttaagtaagtctcccttcataccttcagattatcaacagcaacagtccttggctctgaactcaagctgtatggtacaggaacacctacatctagaacagcaacagcaacatcaccaaaagcaagtagtagtggagccacagcaacagctgtgtcagaagatgaagcacatgcaagttaatggcatgtttgaaaattg

SEQ ID NO: 8 - DNA, 801 bp, Homo sapiens
  misc_feature (401)..(401): M = A/C
ttctaattacctctctgcattcccacattagaaaggagaaaagcactgatatgtttgatatgatataaatgtttaatatcagactcctgctcacaattttctgaaagttactaaaacttctggggctagaaatcaaataacatttgtgccatttaaaaatgtaaaacaaaccaacataaatgtcatcagaagaataaaccttactaatatataagaacatcatcatttgagacaagtattgcaaaaattaaaaagatgatttgtgagcctgattaaattattttactgtaaaaggctacactggaagaatgtacgataatagccaatctaataataaacaatattacatacactgtatgttttacatgctaagagagacttactgaaacataatgtacatmcaataaaataaaagtgaaaaagtctcacttacttggcatcacaaccaataggtgtgaagtctagtttgtgtttggttctaaagataaaatttttggtccggatttcaagtatggatggtggctgaagtggagtagctatcgcaaacaaagccaactgaggtggaagtattgatccatctttccctttctttttctgtccatgaagatactttaacttcccttggaaattcattgccttaaaaaagcaacaacaacaaaaaagttcattaaaattaacaatataaaatagtgcctttttaaaaggctccattatggctgcctctagggttcttgataattccataaatattcctgaagctgagaactgttagtttccttcactcctctctccatgggacgc

SEQ ID NO: 9 - DNA, 632 bp, Homo sapiens
  misc_feature (212)..(212): R = A/G
attaagacagttatataatacattaggcttcaaacaggcttttctatggacattaatgtattttctttagaatgcaagaaatcaggagtttagactttgtggtagcagtagtagctagataccactactttagtcatctacacttaaatcttcctaggaacctaatcttctagtattaaatcatcttgatgccaaccattacacaatttccraaagttgcatctgaaacacaagttgaaatatacacaccccctgtaacaaaacccttcagtggtttccactgggtatataatatagttgaagctctagtctatataactgttattaagaccagcagccttgtgagcttaatagaaatgcaaattcatgggccccactgtgaactactgattcagaatatctgacaatggggctcacagggatgaccaagttttatcaaggtcttcaggtgattcttgtgcacagtacaatttgagaaccagatatatgagaatagcaagcattcaaatgttacaatctgttctcaaaccataaaagatgttcttgcccttccaatatatcaaatatttataattccatctattcactgttcattcaataacatcaaacaagtcagacacgtctgtttcctt

SEQ ID NO: 10 - DNA, 601 bp, Homo sapiens
  misc_feature (301)..(301): Y = C/T
tgaagatatacagaacaattaaaaatagagtaatcttacattaactgcacttgacttggattacgctaatatttttacttttgtattgtcttcgaatctttaagaaaggacactgctaaccattatttaaggaaaagcctgtttgaaatataaataaacatccctgtaagattggatttgggagctctggagttcaaacatctcctgaaatagaccgtatgatgttggtcaggcaaaggagtaacttattattttttgaaacctttacctcaaaaatcttgtcccaatctgtaaaattgtyatgaaatcaagactccagctgactgcatgccatgcttctgtttagaagccctgcaagctttaactgctggtggtaacaggcccaacagtatgcccaatgccagtctgaatgctatcttgaaagcctttttaacatctccatcaaaaaagtctatgaggttcatcatttgtagccagtgtttgaagcaaagctgaaaaaattaaccaagtttactcataaatataactgttttatataatattcattataaaacctcaaaatgacatgcaaagatatggtttcagtaatcctatgagatca

SEQ ID NO: 11 - DNA, 601 bp, Homo sapiens
  misc_feature (301)..(301): Y = C/T
gcgccaccgtgagcgacccaggccaggattctaaatagacggcccaggctcctcctccgcccgggccgcctcacctgcgggcattgccgcgccgcctccgccggtgtagacggcacctgcgccgccttgctcgcgggtctccgcccctcgcccaccctcactgcgccaggcccaggcagctcacctgtactggcgcgggctgcggaagcctgcgtgagccgaggcgttgaggcgcggcgcccacgccactgtcccgagaggacgcaggtggagcgggcgcggcttcgcggaacccggcgcyggccgccgcagtggtcccagcctacaccgggttccggggacccggccgccagtgccyggggagtagccgccgccgtcggctgggcaccatgaacagcagcagcgccaacatcacctacgccagtcgcaagcggcggaagccggtgcagaaaacgtgagtgtcccgagcgcgtcctcatcgcgggggctgggcgctcaggcacgcgggtgcgggaggcagccccaccccgcccccaaatccctgcgatcctgggattaggtccattcccggcactgccmgtggaatcgaggtttggaggcc

SEQ ID NO: 12 - DNA, 601 bp, Homo sapiens
  misc_feature (301)..(301): N = A/C/G/T
agaggtatataaccacaatacctctatcacctgtaaaatcccgattccaggacacaacatagataaattaaataaaaatttttgtagtggagccaaggatccgtaatttttacagttctcaagtgactacaatatgcaacaaatgttgagaaccactgtccacacattaattaaatttgttaaatattttcagtaaagaatacattttgtttcttaatatgaataagaatgatagccttttaaagtttagcaaatctaaattatatattttaggtcagcattttacaataatttacatttnccttaagctgttcttatcaagttaataattttctttgttaaataaatgtattttatcttaatttcagtttcttctatatcatgatttaaaatgcagaaagtatgtattatgtagttttcaaatatatttatctccaaagttaaatggattttagtaaaaatgatatttatacatatatattttaataaaatgtttaataaattagacatgaatcttagcatgtgaaacataaaacttttttataactttccccataatcaaacttcaaattcgtaagaattaaaagtccggaaagaaaga

SEQ ID NO: 13 - DNA, 461 bp, Homo sapiens
  misc_feature (208)..(208): R = A/G
gcaccgatgggaaatgatactatcctgaaacatgagcaaattgaccagcctcaggatgtgaactcatttgctggaggtcacccagggctctttcaagatagtaaaaacagtgacttgtacagcataatgaaaaacctaggcattgattttgaagacatcaracacatgcagaatgaaaaatttttcagaaatgatttttctggtgagrttgacttcagagacattgacttaacggatgaaatcctgacgtatgtccaagattctttaagtaagtctcccttcataccttcagattatcaacagcaacagtccttggctctgaactcaagctgtatggtacaggaacacctacatctagaacagcaacagcaacatcaccaaaagcaagtagtagtggagccacagcaacagctgtgtcagaagatgaagcacatgcaagttaatggcatgtttgaaaattg

SEQ ID NO: 14 - DNA, 601 bp, Homo sapiens
  misc_feature (301)..(301): S = C/G
caaaacatttcctgttgtgaggtggttgtattcatgtgtttattccaatttttttatttctagatctctgagttactttacctacatgtgtttcaagttttcgtaaacaattttaagaactcttaaacgtcttctcagaccaaatcagaagtgtgcattttgcttagactccaactatcactaatgggaaccagaaaaataacactttaagatttacatttaaaaccagttattggtttaaagtttcattctaaaattttagtttcctttcagaatttcagttatcatagttcttcagaastatacttatgaattggcattaacagaggataataatctataaatagactgatgaaaatttggaagttttatggtacagtgtgtcttaagggaatattgtcaaaccagcagttttctaccttggcagtttgagacatcggttattaatacttttaattttgtagaatggtttcttatattaaagtatgtttgtcttatttgacattgtcattgatggttaaagttgggaggcatcccaaatgtctgttctatgtgtttattaatataataatacacttagcatcatatataataggggtgt

SEQ ID NO: 15 - DNA, 601 bp, Homo sapiens
  misc_feature (301)..(301): R = A/G
ggggccctcaaggaagayggaatggaatccagatgggcgggggcaagcaggacggggcggggctacgcgggatctgggcggggcggggccggtgaggggtcgggggtgctcctgctattcagccggtgcgcgcggcggcgggaggcagtggctsgggagtcccgtcgacgctctgttccgagagcgtgccccggaccgccagctcagaacaggggcagccgtgtagccgaacggaagctgggagcagccgggactggtggcccgcgcccgagctccgcaggcgggaagcaccctgratttrggaagtcccgggagcagcgcggcggcacctccctcacccaaggggccgcggcgacggtcacggggcgcggcgccaccgtgagcgacccaggccaggattctaaatagacggcccaggctcctcctccgcccgggccgcctcacctgcgggcattgccgcgccgcctccgccggtgtagacggcacctgcgccgccttgctcgcgggtctccgcccctcgcccaccctcactgcgccaggcccaggcagctcacctgtactggcgcgggctgcggaagcctgcgtgagccgaggcgttgag

SEQ ID NO: 16 - DNA, 501 bp, Homo sapiens
  misc_feature (251)..(251): R = A/G
ttgtattttgactattttaggatttttaaggtatgagagaattatgtagcccttttttaataggaggatgcttaccatcttgggattgaatgcctgctagacagagaaattatggcctttccatatgtctcaaataactgccacatagaaaaacgattgtatattcatgattgtggaatcatcatttgataggagatgctgttttcttgttacaaagtctgaacacctgcataggagttgactgtagggarcagcttaggattcctcagagtggacttgtctgttatctcattgtatccttagctcatgttaccaagtacaggagaagaaaatacaaagtatattgtatattctttttgtgaataacaaggaatttgaaacagataatcaaatcttaaattaacattaccaagcaatgatttttgtttatgtgtttatttctgaagaggattttgctgacccagaattagaattatgctttgagacagttttcccagtgtt

SEQ ID NO: 17 - DNA, 801 bp, Homo sapiens
  misc_feature (401)..(401): W = A/T
tatacataaattatggtttttttaatatcgttaaaacactttttcatatttttaaagctttataaaattactaaaaaagaacgttaaacaaaaagaatgctactgtctgtgaaccatatgggaaacaccctttgcaaatcttgtttttccttcttctaaatagggaatggtataagcaacagactcttcccataggtactagatttcattgaagctaaatagtcctaccatctccatcttcctacatccaggacaactccctaagcatccccaagtttatatatattaaatgcaatacatgtttgttttgccattccagtcaccaagaatgctactgtggcttcctcctctgaaaacaccactcaccttcaaatctctgagtaagatcttgctcaatctcwtcgaatcctgctgctcggacattgctgaagaagtctttcaagtaatccagagcatctttcattcgtgcatgctcactgataatgagggcatcattatatttctgttgaaagtaaaaactgtctcaatatgcttccaatgtctaacacattcactgtatttaagttcaattcgttgtatttaacgaattgttttaagaaaacttttcttttcaaatctattccaacttagctttttaaagatgaatggcctctaacagttatgtaacaaaatctttgaaccaaatactgttaaaagaaaactcaattagctagtaacattaattatcatcactttggattattgaattttaccttagaaaagaaaaactgcacgaaaaacacatatcaaaatttaaaaata

SEQ ID NO: 18 - DNA, 601 bp, Homo sapiens
  misc_feature (301)..(301): M = A/C
attctatggacatctttagtgcttttatgagcatttttgatgaagaaattgaaagactaattggaggccacaattaagcattgactaatactaagttaggagaaccaataaaatctgtgattttacaaagtcaggtaccatatgttcatggaagttgtatatgaatgattatacatgtgcgtgcatgtatatgtattgtacgtatctgtgcctgtttcttgctatatatgttgtactcaaattacatttgcggtctttctttttgcattagattctgcatatacagactcatgaaaaattmatcagagatagtcaagaaaaaccaaaacctgtccctgataaggaaaataaaaaactgctctgcagaaagtgcaaagccttggcatgttacacagctgacgtaagagtgatagaggtaagctgcctttttacaaagtgcctggtcatgttttagcactagctacagcttactgttggtgaaatatttataataaaactactattatttccattgttactgtggccatgatctgtgtatttaaaaaaagctaagaagtgaaaaaaaaatactaaatgttcaataataaagaaatagtttttg

SEQ ID NO: 19 - DNA, 601 bp, Homo sapiens
  misc_feature (301)..(301): R = A/G
gtgactgttactcaagttcaaggttaaatattttctactaaacagagagagggtcaaagttcagtattcgtctagatggctctgaactagaggtagtagagagtaacagaatctcaaaggcttgttattggatccaacttacacttctggggcttataaacaacttgctccagttcctccagattgtgtttgactgttgctatcactgacgcatcaagagaagcacacagcttgcagatataatccaaggcttcatctgtgtttttggcatccccaacaccaaccgaggcagtcagcccartgacctgtaaggagcattcaaaatcattagatgtctgagaaatggtacaatgtttccacaacccctcatataactctttcctgctggggtagggcgtttttttgtttttactaacacacagtgtatggcacatggaggcacataatgcatatttactaagtgaacaaatgaataaaggaaacaaaattcataatgagttgtacaatatggacttgggacctgagaaggacatcttcagtgtggccataagagtaagaaaataggagttaggaagattatagctcttctgaagcattcgtc

SEQ ID NO: 20 - DNA, 601 bp, Homo sapiens
  misc_feature (301)..(301): K = G/T
gtagcatgccaacagccaggacccaaaagcaagctaaaagaggacacttttctttaccttctcatgaaaggtaaagaaaatacattaaatacattaatgtacataattaattaattacataatcccataaaaaacattaggattatattaggacagttttctcaaaagacacatggaacaaggaaaaaactgaaacttgcccattctgtcccagtattcaacaaaagaaaaaaaaggaagcaaacagaaaaactatgtaagtaatggcaataggcttacctgtaggagcacatattattgkgttttttcctttcatagcaggcaaagcaagctctaattggtaatttcttggtttaaatgggctgtacaagtttgtatcagacacttctggaatacaaaaggagcaaaattaccaaacagttcctgctctgaggaatcacggcaatagctacagtctaatgtccacaaattctgactccagcaagaagatcctcattggagaaagtttagaatcctttctcttggtaaccattctagcttttccactaatttgaagtacagaattctctcagtgacaaagtattgatggcaagaaagaaaa

SEQ ID NO: 21 - DNA, 401 bp, Homo sapiens
  misc_feature (201)..(201): M = A/C
caaactaattttgtaggcaagtaactgcctccctcccagaatccagcttcctgctggtctcgcgttagagatgtagctctggctatctgaggggaaaaacgcctctgatgggatgtaaaagaccggttggaatgagcgagtcctaagtagagctgtgaggagggtacagtgtcttacctttctctacaatccacagttcamtgaacttgttcctttctttctccaaagcaagtttcaaagttttgggccagttttccttgtctgatctgagaaggcattccaccaatttctctgcacctgccatcatccccttagtagagcaaatctaagcaaggtaactgtagtttattgatcaattatctcaaaagttttccctttatcaatttttactgaagaaatgt

SEQ ID NO: 22 - DNA, 801 bp, Homo sapiens
  misc_feature (401)..(401): R = A/G
cccagccaagcacacagtagactttaatattagtgaaaataaatgaaacaaaatttcttccccagctttgaacctaaatagatgagcacccttaagcaagtcacttcacctcgctggaactcagtttccccacctaggcctccgagggctcctcaaactctggcaacctctagcctaaaatgctgcggagatcttaccacaaacctggggagtctggcaggctctctgcattgattaaaagaagggaacgaagcaagagaaaaacaagtcctcaattgttttccgccgagaaggcgccgctggagacactcaccctccctaaaccagggggccatgtagctcaggatgtaggtagggtccagggtcttccggatataatcctggaaggcttgcaggctgcrtcgctgctcggtggtcatgccggcctctgcttgcagctagctacgttccccgcaggctgtgcctcactagctttaaagccgggtaggaggagggcgtggcgagcggggaaagcagggattttccgaggaaatgaggccggacgcgaggcggagctgcataggaactttaataactaaagggaaaatcgaaagtgcaactagcggcgggcggggttcgcggaggctgttttgcctcgggctagtttcgtttccctccgcaccgaggaagcccgggaacggagaggacccctaggaattgcttttatttttatgatcttatattttgttttgcttttatagcgctaacgtttagacacagtaaaatgcacacaatctgagtgtgcaattcgatgagttttgt

SEQ ID NO: 23 - DNA, 101 bp, Homo sapiens
  misc_feature (51)..(51): Y = C/T
gagagagagagtgtgtgtaaaggaggaattgtcaaacacttataaaaccaycagatctcatgagaactaactcactatcccaagaacagcatggggacaac

SEQ ID NO: 24 - DNA, 902 bp, Homo sapiens
  misc_feature (501)..(501): R = A/G
tacccagctatgtgggaggctgaggcaggagaatcacttgaacctagaaggcagaggttgcagtgagccgagatcacaccactacactccaacctgggcaacagagtgagactccatctcagaaaaaaaaataataataataacttttatcttattaaatctatttctagtagatgttttacacatcctattggagttcttaaacaatagtgtattagtctgttttcacactgctataaagaactgcctgagactgggtcatttataaagaaaagaggcttaatagattcacagttccacatggctgaggaggcctcaggaaacttacaatcatggcagaaggggaagcaggcaagtcttacatggcagcagatgagagagagagtgtgtgtaaaggaggaattgtcaaacacttataaaaccatcagatctcatgagaactaactcactatcccaagaacagcatggggacaactgcccccgtgatccaatcacctcccrtcaggtccctcccttgacacatggggattataattcaagatgagatttgggtggggacatatagccaaaccatatcaaatagcaattaaaaaaaatcacataagaaaagacactcttaataaaatacaaatagaaaatgaaaaaaaaccaactcataaacttggtttaaataatccatttgtattgggtcttagtaagaatactactactagtaactattatcaagcaactactgtgtcatgtacttttcacacattcttttaattaaaaactctccactaacccttacagttcagtattatccttgttttacagatgaagaaaagccaaagagaagttatataactggcaagtttctctggctccccgcctgcaccactgctcaccagattgcatgaaga

SEQ ID NO: 25 - DNA, 801 bp, Homo sapiens
  misc_feature (401)..(401): N = A/C/G/T
aaaaattcccaacattccattcattcatctatcccagtgtgtacagagtgattactgtgtgtttgttggcagttgactctaaaaagaaggctagaaatgaggctttttaatttttcccaagtactatgagctctgttggcctacaaaatactcagtgctgtgattcactcatttgtgctttgcatatataatatagtacaaactgctaaagatatttttaaaaaatatattttcacaggggtacaagcgatccatgattatacccactatgtttgtttcttctccactcaaagttactcattccctgtagctgaagattgaggacctgatatcatttggacatttctgctggatcaaatggtatcttctcaaaatgaaagtccttccacttcgagtacagngtctgaactccagttgcaatatcctccaccacaaaactttcaatttttataactggaatctcaaatgtcttgtacttcacatggattccccagtcatggctgcagttctgtcgggcacagaatatctttgctcttttttcaaaacttgaaaactgctttggcttgggatgtggtctactcacaaagcattccttaaaagcatctccaagcacagtgtaatggcattcctacagatgaagggatggaataacacacaaaagagaacgttagaaccagtacataattgtgatttaaaaaaaaaaaaaagaaaaccccacaataatctgaggcaaagaacaggtgggtctcacttattttacaattggaggaaaaaaaaaaatagattcacccaaagtccaga

SEQ ID NO: 26 - DNA, 601 bp, Homo sapiens
  misc_feature (301)..(301): N = A/C/G/T
gcaggcaagtcttacatggcagcagatgagagagagagtgtgtgtaaaggaggaattgtcaaacacttataaaaccatcagatctcatgagaactaactcactatcccaagaacagcatggggacaactgcccccgtgatccaatcacctcccgtcaggtccctcccttgacacatggggattataattcaagatgagatttgggtggggacatatagccaaaccatatcaaatagcaattaaaaaaaatcacataagaaaagacactcttaataaaatacaaatagaaaatgaaaaaaanccaactcataaacttggtttaaataatccatttgtattgggtcttagtaagaatactactactagtaactattatcaagcaactactgtgtcatgtacttttcacacattcttttaattaaaaactctccactaacccttacagttcagtattatccttgttttacagatgaagaaaagccaaagagaagttatataactggcaagtttctctggctccccgcctgcaccactgctcaccagattgcatgaagagggaggcagctgtaacacctcatcccgttgatctccagggaactca

SEQ ID NO: 27 - DNA, 801 bp, Homo sapiens
  misc_feature (401)..(401): R = A/G
tacacattgctacatacagcaactctacagtggacagcttttagtagtaagcataaaaatggctttatgttctcatgttctctgtgtagccataccacacgttgctacaccaggaacatgagtacatataaccattacatatacatacctgtatgtatgtatattagttacatatacatatgtacagtatatacatgtatatatattgaacccttggaagggatcagcaaagaggaggactcaataaaaaaagactagaatagaactagaagagagagaagcccagggagagcttcaagaagagtgctcaacagggccaaatgcgcagaggtcaaatagaaggttaagaagtgcccagtggatttggcaaccagagtcactggtaaccttcaaaagaacartttcagtagattgttaagggcaaaagccagtttacagtaggttaaggagacaaagggagataaaaattcccaacattccattcattcatctatcccagtgtgtacagagtgattactgtgtgtttgttggcagttgactctaaaaagaaggctagaaatgaggctttttaatttttcccaagtactatgagctctgttggcctacaaaatactcagtgctgtgattcactcatttgtgctttgcatatataatatagtacaaactgctaaagatatttttaaaaaatatattttcacaggggtacaagcgatccatgattatacccactatgtttgtttcttctccactcaaagttactcattccctgtagctgaagattgaggacctgatatcatttgg

SEQ ID NO: 28 - DNA, 701 bp, Homo sapiens
  misc_feature (201)..(201): W = A/T
gatataatcctggaaggcttgcaggctgcgtcgctgctcggtggtcatgccggcctctgcttgcagctagctacgttccccgcaggctgtgcctcactagctttaaagccgggtaggaggagggcgtggcgagcggggaaagcagggattttccgaggaaatgaggccggacgcgaggcggagctgcataggaactttaawaactaaagggaaaatcgaaagtgcaactagcggcgggcggggttcgcggaggctgttttgcctcgggctagtttcgtttccctccgcaccgaggaagcccgggaacggagaggacccctaggaattgcttttatttttatgatcttatattttgttttgcttttatagcgctaacgtttagacacagtaaaatgcacacaatctgagtgtgcaattcgatgagttttgtaaagtgtacacctgtgtacccagttctcccacgtcggctgggtgccagggtaagtctatgtttagctttataggaaaccgccacctgttgtccaaaatgactgattacatccagtttacattcccacccgcagtaggagagctccagtagatagacacattggtcagcctttcttttttttttttaattttaacttccatcttggtcggtgtgaaatggtatattattgtggttttaattttaatttcccatataattaatggtgggcaca

SEQ ID NO: 29 - DNA, 693 bp, Homo sapiens
  misc_feature (201)..(201): N = A/C/G/T
cgtgccctttgactcctgggaccagctcatgaggcagctggacctcacgaaaaatgagatcgatgtggtcagagctggtacagcaggcccaggggatgccttgtatgcaatgctgatgaaatgggtcaacaaaactggacggaacgcctcgatccacaccctgctggatgccttggagaggatggaagagagacatgcaanagagaagattcaggacctcttggtggactctggaaagttcatctacttagaagatggcacaggctctgccgtgtccttggagtgaaagactctttttaccagaggtttcctcttaggtgttaggagttaatacatattaggttttttttttttttaacatgtatacaaagtaaattcttagccaggtgtagtggctcatgcctgtaatcccagcactttgggaggctgaggcgggtggatcacttgaggtcagaagttcaagaccagcctgaccaacatcgtgaaatgccgtctttacaaaaaaatacaaaaattaactggatgtgatggtgtgtgcatatattctcggctactcgggaggctgaggcaggagaatcacttgaacccacgaggcagtgagctgagattgcaccactgcactccagcctgggacacagagcaagactctgtctcaagataaaataaaataaacttgaaagaattattgcccga

SEQ ID NO: 30 - DNA, 601 bp, Homo sapiens
  misc_feature (301)..(301): K = G/T
gcagacatttggaagagtgcctgtccccttgtgagggtggctgctttttcccacgcagccccgtcccctgcagtcccatctccctcaggctccacttcccctttgaccaggagagccgaggcatggccttcaccccctgcctacaaggtcttggaggggcctgtccccaactcaccagcagacactgtgcctcccctggggactgtacagtgacacctgtcaaatctgccggctcctggctttccatttgctgctcagagacgaaagtggacagcgagtctgcgttgctcagaatctcgtkgtgagcattgtcctcagccccaggccctcgtaggagacccaagcgccagaaacacaccttaggaaggcaaagagccaactcagaagcccacacccagggctccccacggggtccgtagggcacggctggacctgctgccaccaccccctcccagtgaggtcactccaggaagtccatgctcagcacatccaggacctgctgctggggccaggccctggtgctgggcttgggggctcaccccatccccagggtacaggctgtggggtaagggtctcacctgggctgtaggaagcacagggc

SEQ ID NO: 31 - DNA, 601 bp, Homo sapiens
  misc_feature (301)..(301): M = A/C
cacagaaggctcctggaactgcagctctgaccccagagcagggaggccaagggggtaaagtgtgcatgctcagacccttccccagcctaaacaagggagcatagggggaccccctgcagatacgaggagactatccttcccctgacgccttctcagggacattgggcagggagagtggctcctctttcatcccacctggccagctttccatcaagagtcccccccctccctccctgtgtgtacccaggtgccccagagggatggtcaaggtcaaggattgtacgccctggagtgacatcgmgtgtgtccacaaagaatcaggtacaaagcccactggggaagccccagctgcagaggagacagggaccagcagcccgagactcctgtcttttcctgtcttttctcaggcaatggacataatatatgggtgattttggttgtgactttggttgttccgttgctgttggtggctgtgctgattgtctgttgttgcatcggctcaggtaggtgctggctgagggcaagggctctgggcactctctgccctgccttcttctgttcccacagacagaaacgctcacccctgccccaagtcctagtg

SEQ ID NO: 32 - DNA, 601 bp, Homo sapiens
  misc_feature (301)..(301): S = C/G
tccaagtgttggtgacagctgaagggtgggtgtcctgtgtgagcccgagtgtgctggtgcagaatctggccctcagaactccttggcaaactgagttgagctgagctgagggggagggagttggggtggtgaggaaaggtcaagggacacgtcagggaaacacattcccaaaaccttgtactctgtcatcagatgaagaagagagaagtccctgcaccacgaccaggaacacagcatgtcagtgcaaaccaggaactttccggaatgacaattctgctgagatgtgccggaagtgcagcasagggtgagacaacagccaaggggctcccagcagcctcaaagaaaccacagaagcaagaaccctaaaaagacccgagtctccttgtacccgtatctatcagccctgaccccatggtgcctccacccccataggtgtccctgagcctgtggcgtctcctgagcctgcaacctgcccctcctggtccatctgcctgtccccacccctgtcccctgcagtggccccttctcacccctccccagcactagtccccttggccaggctgacttgttcactaggcacaggaggccatgacttagggcc

SEQ ID NO: 33 - DNA, 701 bp, Homo sapiens
  misc_feature (201)..(201): S = C/G
gaagaacatggaaaaggaatgttattgatgaattttgagataatttttgtatatagtatagggtaaggaaaagagaggtgtaaaggattagagatcagtcttagaatgtacctggtggacacaactctcccaaagggctatgttcccattgctgtgtgccaattgattgatcatgaagtttgatggttgcagctgagctasgtacgacctgtggggacaaagcagggactggcatgagtggcttccagatctcacccattacaagatcaatctcacattccattcccccaagcctccaaaattagacagaacttgcatctttctcccagttctaaaactcaaccatttgtttgtgctcatctttgtctctttgtccccatgcccccagcctgtggcaactaccattctactgtctgtttctatgaatttaactactctacatacttcatataaatggagacatacagtattttatggttttcttgaggctgtcatatttcaattagcataaaatcatcacgatccatccattcggtaccatgcattggaatttcattcctttccattgtgtgtatatgtattacgtttatccattcatctgtcaatgggcacttggtttgtgttcacattttagctattgtgaataaagctgctatgaacacgggtgtacaaaatctctttatgccctttctttcaattct

SEQ ID NO: 34 - DNA, 501 bp, Homo sapiens
  misc_feature (251)..(251): Y = C/T
aagggcggtcacagaggaaggaagttcagggttagccaacaggagccgcaggtgccccgaaaagggggcggggtcaggggtgccctgaactccgaatgcgaagttctgtcttgtcatagccaagcacgctgcttcttggattgacctggcaggatggcgccaccaccagctagagtacatctaggtgcgttcctggcagtgactccgaatcccgggagcgcagcgagtgggacagaggcagccgcggccayacccagcaaagtgtggggctcttccgcggggaggattgaaccacgaggcgggggccgaggagcgctccctacctccatgggacagcacggacccagtgcccgggcccgggcagggcgcgccccaggacccaggccggcgcgggaagccagccctcggctccgggtccacaagaccttcaagtttgtcgtcgtcggggtcctgctgcaggtgagtccccaccgcggtcctgcctggggaaaagcgcgcctg

SEQ ID NO: 35 - DNA, 441 bp, Homo sapiens
  misc_feature (210)..(210): K = G/T
ttgaggaacagaagctgagagcggcaagggcggtcacagaggaaggaagttcagggttagccaacaggagccgcaggtgccccgaaaagggggcggggtcaggggtgccctgaactccgaatgcgaagttctgtcttgtcayagccaagcacgctgcttcttggattgacctggcaggatggcgccaccaccagctagagtacatctagktgcgttcctggcagtgactccgaatcccgggagcgcagcgagtgggacagaggcagccgcggccayacccagcaaagtgtggggctcttccgcggggaggattgaaccacgaggcgggggccgaggagcgctccctacctccatgggacagcacggacccagtgcccgggcccgggcagggcgcgccccaggacccaggccggcgcgggaagccagccctcggctccgggt

SEQ ID NO: 36 - DNA, 601 bp, Homo sapiens
  misc_feature (301)..(301): N = A/C/G/T
tgctctgtgtcccaggctggagtgcagtggtgcaatctcagctcactgcctcgtgggttcaagtgattctcctgcctcagcctcccgagtagccgagaatatatgcacacaccatcacatccagttaatttttgtatttttttgtaaagacggcatttcacgatgttggtcaggctggtcttgaacttctgacctcaagtgatccacccgcctcagcctcccaaagtgctgggattacaggcatgagccactacacctggctaagaatttactttgtatacatgttaaaaaaaaaaaaaancctaatatgtattaactcctaacacctaagaggaaacctctggtaaaaagagtctttcactccaaggacacggcagagcctgtgccatcttctaagtagatgaactttccagagtccaccaagaggtcctgaatcttctcttttgcatgtctctcttccatcctctccaaggcatccagcagggtgtggatcgaggcgttccgtccagttttgttgacccatttcatcagcattgcatacaaggcatcccctgggcctgctgtaccagctctgaccacatcgatctcatttttcgtgagg

SEQ ID NO: 37 - DNA, 601 bp, Homo sapiens
  misc_feature (301)..(301): Y = C/T
gcccaggtgagacccttaccccacagcctgtaccctggggatggggtgagcccccaagcccagcaccagggcctggccccagcagcaggtcctggatgtgctgagcatggacttcctggagtgacctcactgggagggggtggtggcagcaggtccagccgtgccctacggaccccgtggggagccctgggtgtgggcttctgagttggctctttgccttcctaaggtgtgtttctggcgcttgggtctcctacgagggcctggggctgaggacaatgctcacaacgagattctgagcaaygcagactcgctgtccactttcgtctctgagcagcaaatggaaagccaggagccggcagatttgacaggtgtcactgtacagtccccaggggaggcacagtgtctgctggtgagttggggacaggcccctccaagaccttgtaggcagggggtgaaggccatgcctcggctctcctggtcaaaggggaagtggagcctgagggagatgggactgcaggggacggggctgcgtgggaaaaagcagccaccctcacaaggggacaggcactcttccaaatgtctgcttcttagtccctgtcct

SEQ ID NO: 38 - DNA, 465 bp, Homo sapiens
  misc_feature (201)..(201): Y = C/T
cgctgggaccaagtggcaaaacgactccgaatgcagcggcatccacgcggcggccgtggttgaggaacagaagctgagagcggcaagggcggtcacagaggaaggaagttcagggttagccaacaggagccgcaggtgccccgaaaagggggcggggtcaggggtgccctgaactccgaatgcgaagttctgtcttgtcayagccaagcacgctgcttcttggattgacctggcaggatggcgccaccaccagctagagtacatctagktgcgttcctggcagtgactccgaatcccgggagcgcagcgagtgggacagaggcagccgcggccayacccagcaaagtgtggggctcttccgcggggaggattgaaccacgaggcgggggccgaggagcgctccctacctccatgggacagcacggacccagtgcccgggcccgggcagggcgcgccccaggaccc

SEQ ID NO: 39 - DNA, 511 bp, Homo sapiens
  misc_feature (256)..(256): R = A/G
gtagacacaaggctttgggattcccttcagagaaggagcaatgcatctccatcactcgtgtggtaagtaaaattgctgctcagaacacttccatgcctgctcctttgtgattcagatgaggagaaatcaacgtggactgagcgcccacacaggacagccaggcatttcccatacaggtggtaaaggtatcttctgaacttctccccagcaaatgcatagatgagaggattcaggcaacaatggctaaatgcaaccrtctcagtcacactgagggccagcctcagatccttcctcatgtcacaactgggaaagaagtcatagagcttaagcgtctccaggaaaatcataacgttgtagggtgtccagaagaggaaaaacacgatgaccaccagaaggatcagtttaatggctttggctttcttgtggttcttgcaggaaaacagcgtctggatgattctgaagtagcaataactcataatgagcagggggagtaggaagccaagaaaatttg

SEQ ID NO: 40 - DNA, 601 bp, Homo sapiens
  misc_feature (284)..(284): n is a, c, g, or t
  misc_feature (301)..(301): Y = C/T
agggtgtccagaagaggaaaaacacgatgaccaccagaaggatcagtttaatggctttggctttcttgtggttcttgcaggaaaacagcgtctggatgattctgaagtagcaataactcataatgagcagggggagtaggaagccaagaaaatttgtttccacattgcggagcacgggccagatttcctggaggacctcggggtagtcaccaaggcattcattttctttctgctttgtgaacatgaactggggtgctgccaccaaaatggctgctgcccagacncctaggctgatggtgaygccatgctgcacggtccggttgttcatggagttggcggccaggacgatggccaggtacctatcaatgctgatgacggtgatgaagaatatgcttccaaaaaagccgatgaagaagaaggcggtagtgaatttgcacatggcattgtggaggcccttttcatttatcaaatagtgagtccagaagggcaaagtggctacaaacagcagatcagacaaggccaggttcaggaggtaaatgtcggtgacactcttgggcttcttgctgttggtgagggcaaacactaccaacaaatttcccac

SEQ ID NO: 41 - DNA, 601 bp, Homo sapiens
  misc_feature (301)..(301): K = G/T
tcacagagccatttactgcatggctttgggcaagtcaaaggagtccgcctctcctgtcagaagagtctgttgcagtcttcatcacaagactgttgtggggattaaacaagatggcaagtgggaagttgggaaatgtagtgtgcacccaaccaatatttgtttcttcctgcctgcctacatatgaggccacacagaattccaactttgtttctctgataactaacacagttacttgtttttctttctgatccaggccttcaccatggatcagttccctgaatcagtgacagaaaactttgaktacgatgatttggctgaggcctgttatattggggacatcgtggtctttgggactgtgttcctgtccatattctactccgtcatctttgccattggcctggtgggaaatttgttggtagtgtttgccctcaccaacagcaagaagcccaagagtgtcaccgacatttacctcctgaacctggccttgtctgatctgctgtttgtagccactttgcccttctggactcactatttgataaatgaaaagggcctccacaatgccatgtgcaaattcactaccgccttcttcttcatcggcttt

SEQ ID NO: 42 - DNA, 601 bp, Homo sapiens
  misc_feature (301)..(301): M = A/C
tgcctcagccccttccttgcctctgactcccctcctcttctgagggctcctttcttggatctggccaagactctccctctcttcctgtcccacactcttgacgacagtctcatccaccccacatcagtaatcccctccgtgttcatgagcacacatctctacctccatccagggcctggataatttcccaagcccatctaaccttctccgttctctgtctttcctctcaccacttaccccactggccattctccacccagaagccagagagctcttcctgaaatccaagtctgccaacttmaacgcctccaggggttctctcatcctggtttaagtccacggcctggtaagcacggcccgccccttctcacttcctactgtgctctcaccacttccacttcccccaacatgcctgtgcccgtggcaggctctcttcccttcccaactcacctggctgtcctgtccaggacgtgattttaccctcttttaaagctaacggctatgttccacagctgctagcagcacagggcttcatgcttggcaagcatgagaaccagcgtccagtgtcagttgccttgcccccaagccccacagagtgatg

SEQ ID NO: 43 - DNA, 601 bp, Homo sapiens
  misc_feature (301)..(301): S = C/G
agctatcagatacacagcaatttaacagttaccacatctgacttcaatgaatacacagtctggtagagtcttctaaaatgataattaccaaactacatagaaagcgagcactatttgtggtctaacgttaagaggaaaacaaatcagattataaaaccatctgtacattacgattgcaactctaaacatgtgagagtgtgaacaaggtctggacgggtgaatacaggaatgacaatattgatgtggttagattggatgactttttctttagcattattacaattgttttcgagctttaaasttttagattgttccaaacgtttctaggggggaaaaaaaagctgctcccatagccctggctccccaggttggcagtagcatgaatgatggggtattttcccagatgggcaggggcttgccacaaggtgactgggaggggatattcaaggcagtccaggagagttgggttacggaaggctatcactctgtagacttgggagtgctcactgggtgccatcgtaagaaccagcctcttctgtgtctgggctatgccacgcagcagcacctgcaggctcttccaagctttgtcagcaccacaact

SEQ ID NO: 44 - DNA, 601 bp, Homo sapiens
  misc_feature (301)..(301): R = A/G
gttggggttggaatccatcccttcttatttgggggcagggtttttctatttcccttactggcctgggagcaggtggagatgcatgaggtcatatggaagagacaggctgataggatgggtggagtcctttgggaaggaggaggcaatggggaatctattggtaggaccccatggtggacgtatgagaagccaagcatttgagttttgactcgatgcagtaggcagtggggagcccttgcaggtttggggacatgatggaagagggcttaatgaagacgaggctggtgtaatcaggggagargctggatcaggcacatggtaagggtgatgtgtggcatttgttttgtgtaatcagaatagtacccacccatccaacttcttggaaatatgtatttctgcttctccatgagattggactggaagcttccatcttatatatcccttccccatggataacagcaccttccagggatgggcacctgatacaaacttggcctatcagagcacttccctgggaattttgcccttggggccagagaaacatgggtgtcagtccctctctggtgataaagctgtgtcatgtaaagtctgggggatctat

SEQ ID NO: 45 - DNA, 511 bp, Homo sapiens
  misc_feature (256)..(256): Y = C/T
ttatatatcccttccccatggataacagcaccttccagggatgggcacctgatacaaacttggcctatcagagcacttccctgggaattttgcccttggggccagagaaacatgggtgtcagtccctctctggtgataaagctgtgtcatgtaaagtctgggggatctataatgactaaaagatttgagagtcagagagagggaattctagcttggctcaggccctggtttcccctcactttgagggctcagacayccttttgcttgtgccacaatatgaacaatattcaccaccctcatttaactaaactagtctgagttgaatttttgtcatctgcaaaccaaaaagttctgatgacatttgcagtaagagaaatgtctactctttgtcattcaaagagttcaatttgttcattcttcaaattttgagcacaattctcaacaacactctagggttgttttgtgtgcattgggtccatcattttgtgcctgtaagaaataacaacaaaaa

SEQ ID NO: 46 - DNA, 601 bp, Homo sapiens
  misc_feature (301)..(301): Y = C/T
acctgtatgggaaatgcctggctgtcctgtgtgggcgctcagtccacgttgatttctcctcatctgaatcacaaaggagcaggcatggaagtgttctgagcagcaattttacttaccacacgagtgatggagatgcattgctccttctctgaagggaatcccaaagccttgtgtctacagagaacctggagttcctgaacctgatgctgactagtgaggaaagatttttgttgttatttcttacaggcacaaaatgatggacccaatgcacacaaaacaaccctagagtgttgttgagaaytgtgctcaaaatttgaagaatgaacaaattgaactctttgaatgacaaagagtagacatttctcttactgcaaatgtcatcagaactttttggtttgcagatgacaaaaattcaactcagactagtttagttaaatgagggtggtgaatattgttcatattgtggcacaagcaaaagggtgtctgagccctcaaagtgaggggaaaccagggcctgagccaagctagaattccctctctctgactctcaaatcttttagtcattatagatcccccagactttacatgacacagctttatc

SEQ ID NO: 47 - DNA, 449 bp, Homo sapiens
  misc_feature (208)..(208): Y = C/T
cctaggcgtctgggcagcagccattttggtggcagcaccccagttcatgttcacaaagcagaaagaaaatgaatgccttggtgactaccccgaggtcctccaggaaatctggcccgtgctccgcaatgtggaaacaaattttcttggcttcctactccccctgctcattatgagttattgctacttcagaatcatccagacgctgttytcctgcaagaaccacaagaaagccaaagccattaaactgatccttctggtggtcatcgtgtttttcctcttctggacaccctacaacrttatgattttcctggagacgcttaagctctatgacttctttcccagttgtgacatgaggaaggatctgaggctggccctcagtgtgactgagayggttgcatttagccattgttgcctgaatcctctcatctatgcatttgctggggagaagt

SEQ ID NO: 48 - DNA, 601 bp, Homo sapiens
  misc_feature (12)..(12): n is a, c, g, or t
  misc_feature (301)..(301): R = A/G
  misc_feature (318)..(318): n is a, c, g, or t
gaaaatcataangttgtagggtgtccagaagaggaaaaacacgatgaccaccagaaggatcagtttaatggctttggctttcttgtggttcttgcaggaaaacagcgtctggatgattctgaagtagcaataactcataatgagcagggggagtaggaagccaagaaaatttgtttccacattgcggagcacgggccagatttcctggaggacctcggggtagtcaccaaggcattcattttctttctgctttgtgaacatgaactggggtgctgccaccaaaatggctgctgcccagacrcctaggctgatggtgangccatgctgcacggtccggttgttcatggagttggcggccaggacgatggccaggtacctatcaatgctgatgacggtgatgaagaatatgcttccaaaaaagccgatgaagaagaaggcggtagtgaatttgcacatggcattgtggaggcccttttcatttatcaaatagtgagtccagaagggcaaagtggctacaaacagcagatcagacaaggccaggttcaggaggtaaatgtcggtgacactcttgggcttcttgctgttggtgagggcaaacact

SEQ ID NO: 49 - DNA, 701 bp, Homo sapiens
  misc_feature (501)..(501): S = C/G
agagagagagagagagaagaacccatgagccaaagccttaattagagtccagggcataatctaagcaggcttcccacagggagttctaactgggggtttagagctagcaggcaggagttctgtggagccacactgtgactgagaggtggttgctgcagtatatctgcgcagcctatgagggacacaggagtcaatacgtaagtcaagtaggttgtagctgtatgtcccatagggagctggtcacaaggagatggttgtataaggcagacatttggattaaccaccttggggaactgggaggaggtagagaattggaaattgtgtccaggtgactaagccctgcttctggcatgagaaagtccaacttacattcaaaataaatcccaaggcaacatataaatataagaactcattattctacacctgcctctttattcctactgtgacacctttccttcccctttactcagggttccaggaagaagccctggccagacagcsccggagatcaagcatctcctcctggggatgcccctcccttggaagaacaaaaggagctccattatgcctcccttagtttttctgagatgaagtcgagggagcctaaggaccaggaggccccaagcaccacggagtactcggagatcaagacaagcaagtgaggatttgcccagagttcagtcctggctggaggagccaca

SEQ ID NO: 50 - DNA, 501 bp, Homo sapiens
  misc_feature (251)..(251): N = A/C/G/T
ctcccctcaggcccctgccctctgcaatacgccccctgaccttgcagcagcaggacagagccgctctgggacccatagatgttccaggccttgcagctgactttgaggtcggagctgagccccccgtggaggatcagggagctgttggcccagggcccagctgagctggagttgaccttgaatgagccctggctgctgttcccctccagcggcttctcctcaagccgccagcacagggagggggccggccnggctcgaaaggagcatctgcagtgcagaccctcagcctcccaggagcaggaggggcccagcaactgtgggagggctgtggggagggaggacagaactcagcagggggcctcttccttctttaataccatgcagttcctgctccagctgcccccacactcacagtaaactgagagattcagaaaaatttgcaggaagcccagcgggtgctgagcgcggcaggtgaagcctccttcttctgcagaccttact

SEQ ID NO: 51 - DNA, 401 bp, Homo sapiens
  misc_feature (201)..(201): N = A/C/G/T
ccggccgggctcgaaaggagcatctgcagtgcagaccctcagcctcccaggagcaggaggggcccagcaactgtgggagggctgtggggagggaggacagaactcagcagggggcctcttccttctttaataccatgcagttcctgctccagctgcccccacactcacagtaaactgagagattcagaaaaatttgcaggnagcccagcgggtgctgagcgcggcaggtgaagcctccttcttctgcagaccttactcgacgaagctccaagatcccggtattggagatgggggtggcgttcagggcaggggagccctggaaccagctcaggtgtgcaggggggttgctgggagcatcacagagcagccgcagagcctggccctccaggaccggaaggtat

SEQ ID NO: 52 - DNA, 601 bp, Homo sapiens
  misc_feature (301)..(301): Y = C/T
gatgggcatgggcccaggaggtacccaaagaggagccacagaaacccaccaagcggggaaggctgtcctgtctcactccccgcagatcccaaggcttagatccacacacaaggtttctcaagttattgttttgtttctctctgtcttccttacacacacacacacacacacacacacacacacacacacacccctcactcccactgcccttgaggactcagctgtgtccccagcaccactcacaggagacattgagctggacagttctctccgtggtcacctgagctccttggcgtttcayctgacaggtgaggttggtgccatggtcctcgggcctgggggtgagggtgagctccgaggagcgggtggtctcggggtccagggggctgagggcattccccgtccaggagaatgtgagaggtggtcccgcttcacaggatcctggaaggctgcagctcagccttgtggggcggccggactccagaggctccagaaagtggatgtcgggtttctctatcagggctgaggaggagacagggagatacctgggccccaggggcttgaggacgtaaggtgtgaccccgagagtggccaggcctca

SEQ ID NO: 53 - DNA, 998 bp, Homo sapiens
  misc_feature (500)..(500): R = A/G
cccgcttcacaggatcctggaaggctgcagctcagccttgtggggcggccggactccagaggctccagaaagtggatgtcgggtttctctatcagggctgaggaggagacagggagatacctgggccccaggggcttgaggacgtaaggtgtgaccccgagagtggccaggcctcaggccccgacctgccccaagtcctacacctcctccagccgcccctgcccaactcctgtccctgttctcatacgggggtctccacgtcccagggtcctctcctggggtccctgccatacctgtcacctccaagttcagcttattctgttggtagctatattttacatcccttcctctctccacgcggaagaaatagcttcccgtgtcctccattctggcatctccgatgctcagggagcagttcttcttctggacatccccaaggaggcggaatcggccctgggtctctggcttcactcttctgtctgggttgtttgtggccacarcctcagcgtagtatgggatctccccgtcccggaaccagtagacgtagagtgggggagaggaataccaggatctccaggggtaagagaaggagcagggcacaaggacgcacaggccctcctgcaccgtcaccgacttctgcacttgcagctcgtacactggcttctcctgcagggaccctggggggacacagaagctcagctgcagctccagccccccttctcacccctgtgcctgtccctcctccctcagctcactcacccccccacagcaggggcagcagcagcaggggcagcatgtctccatccgccagggccccagcccagtcccaggtccggctgtcagggaaggaaatgctccaaatgtccaaacgtggggtggggctgagaaagccccgacaggaagccggagggtgagtgagagctgtggacgcgcacagaaggggaacttgggcatcacgtgctgttggggtgaggcgggggctgggaagccattctgct

SEQ ID NO: 54 - DNA, 501 bp, Homo sapiens
  misc_feature (251)..(251): N = A/C/G/T
gcctcaacctccatgatcaagtgatcctcctgcctcagactcctgagcatctggaaccacaagcacacatcaccacctctggccttagctctgtgtttctgagattcagtctctcctactccctacaaacaccaccctgtaccttccctgggaccaagacttacattaaaaagaagatgaggcacagacagatacagagcagggccatgacaccagcaccaccaagggctgcaggaaccactcctgtcccnaggttcgatctccctgcagaaaagaggggcgtgcaataactcactcccaggactcagactcttgtcctcccacctgctgggcaacttgctccagggccctgctcagacaggagatgaagaaccctgtctccccaccaccagtccagcctctctctcccaccatccatcactctgggatccatgcccctcccctcaggcccctgccctctgcaatacgccccctgaccttgcagcagcaggacagagccgc

SEQ ID NO: 55 - DNA, 501 bp, Homo sapiens
  misc_feature (251)..(251): N = A/C/G/T
cagggccctgctcagacaggagatgaagaaccctgtctccccaccaccagtccagcctctctctcccaccatccatcactctgggatccatgcccctcccctcaggcccctgccctctgcaatacgccccctgaccttgcagcagcaggacagagccgctctgggacccatagatgttccaggccttgcagctgactttgaggtcggagctgagccccccgtggaggatcagggagctgttggcccagggnccagctgagctggagttgaccttgaatgagccctggctgctgttcccctccagcggcttctcctcaagccgccagcacagggagggggccggccgggctcgaaaggagcatctgcagtgcagaccctcagcctcccaggagcaggaggggcccagcaactgtgggagggctgtggggagggaggacagaactcagcagggggcctcttccttctttaataccatgcagttcctgctccagctgcccccac

SEQ ID NO: 56 - DNA, 801 bp, Homo sapiens
  misc_feature (401)..(401): R = A/G
gaacccaggatgagttatcctactaaagaaggaagtgatacagctggaaatgctcacaaaaattctgaaaatgagcctcctaatgactgtagtacagacatagagtctccatctgctgatcccaatatgatctatcaggtagaaaccaacccaataaacagggagccaggcacagcaacctcccaggaagatgttgttcctcaagcagcagaaaacagcgagctcgaaacagagatccaaaaagatcaacgagaagaagatctaaaagaagagcttcttctacttcagacccccattcccagaaaattggtctctcacaagcccttaaatgatagatcaagatcccactcagggaaagttgagatgaaagcaaacaatttccccataaatcacaaaactcrttttcgactttcaacttcatggagagtcccatttattaacagtcatgagataagaagtatgattctccatctgctatgtgatagatatttctctcaggctgcagggtgtcagaataccatgtgggtaaagcgaaaatatatagcatgtctttaccatccaaatagtttcacccatcacgagagagccataacatttagaaggccttcgagggtgcactactaccgtcccctcactgagagaatgacatcaggaaaattttgcaaatcaactgacactaaagggaaatgtagattccgtgctattgtgaggtctgtgctctttgtgtcacagatacaaattgaaagtatttttaatataaaaggttttgtggatatattgacatatatccataccatgaat

SEQ ID NO: 57 - DNA, 801 bp, Homo sapiens
  misc_feature (401)..(401): M = A/C
tgggtaatacagatccatcttattcaatgaaaattatttataattcaccatccaaaaggaaataattgggccttctcttcagaactaaatgtgttctagtgcatagggtatatacctaaaatagccaaatgagaggttatgttattccaagtttactgaaattccataattaagttatgagaaaacatatttaataggaggcttacatttgccctcagttttcactttattctgtgggtttgtgactctgatacaatatttatagttgcgagaaggcacagaaatagcacattcacaggctttttgccatgaccaaagaattgacttcttataaaatggaacatacataaatttagtaaatctttgtcttctttcccataaatagaacccaggatgagttmtcctactaaagaaggaagtgatacagctggaaatgctcacaaaaattctgaaaatgagcctcctaatgactgtagtacagacatagagtctccatctgctgatcccaatatgatctatcaggtagaaaccaacccaataaacagggagccaggcacagcaacctcccaggaagatgttgttcctcaagcagcagaaaacagcgagctcgaaacagagatccaaaaagatcaacgagaagaagatctaaaagaagagcttcttctacttcagacccccattcccagaaaattggtctctcacaagcccttaaatgatagatcaagatcccactcagggaaagttgagatgaaagcaaacaatttccccataaatcacaaaactcgttttcgactttcaact

SEQ ID NO: 58 - DNA, 801 bp, Homo sapiens
  misc_feature (401)..(401): S = C/G
atgaaagcaaacaatttccccataaatcacaaaactcgttttcgactttcaacttcatggagagtcccatttattaacagtcatgagataagaagtatgattctccatctgctatgtgatagatatttctctcaggctgcagggtgtcagaataccatgtgggtaaagcgaaaatatatagcatgtctttaccatccaaatagtttcacccatcacgagagagccataacatttagaaggccttcgagggtgcactactaccgtcccctcactgagagaatgacatcaggaaaattttgcaaatcaactgacactaaagggaaatgtagattccgtgctattgtgaggtctgtgctctttgtgtcacagatacaaattgaaagtatttttaatataaaagsttttgtggatatattgacatatatccataccatgaatgttatgatcacaaacaccaataatggttggaaatacttttgtcccatctgtggaaggctttttaacacttactctgaattaagacaacattcatgcagctcttctgggaattaaattaaattggggtaaattcattttaaaatataacttctaaaattcataatttgactactaaagtaagacaaaattgcatgaacataaattttagtattattagagggagtagcagaaaggaacacaaactaatagtacctctcagtaagaaatacctatggggagtgaggaaacatctgtttatactttgcttttacaagtacatcattgaaatatcagacctgtcatctatattgagtcagcatttga

SEQ ID NO: 59 - DNA, 801 bp, Homo sapiens
  misc_feature (401)..(401): Y = C/T
atgcagctcttctgggaattaaattaaattggggtaaattcattttaaaatataacttctaaaattcataatttgactactaaagtaagacaaaattgcatgaacataaattttagtattattagagggagtagcagaaaggaacacaaactaatagtacctctcagtaagaaatacctatggggagtgaggaaacatctgtttatactttgcttttacaagtacatcattgaaatatcagacctgtcatctatattgagtcagcatttgaaccaagtaaatgttttcactgtcttaacatctatttctgtagatgtaaatattgttaacataaaagaatccaagttaacaggatcctgactaagatagcaaacatatattggaaggccagacaaagttcyaccaagtgtttccagagattctgctacatgtattatctgaaatgttctccatatattcaataaaaaccaatttgaagacatagaaagttgtattgtatatttgtaattagagaagaattcctatgtctggaataaaaagattcaacatactataaaatacacaatacttgggtaattttgaagatacagaataataacaaaactcataaaaaagtatatgatagaagtgaaacagtttgaagtaaaagtgaacaaatattaaattgataccatataactgtaaacctttttgcttgtatagcacattcaccattgttcacaatcactacacaaagtttaccttcccctccatacatacatgcacaaatgtgtgcacatatttaagacgttccttatcttg

SEQ ID NO: 60 - DNA, 601 bp, Homo sapiens
  misc_feature (301)..(301): W = A/T
gcaaagtcacattgctgtgggcagggatacagagaagaatggacacttatggctacttttaccacctacccacagacgcgtgatctgaggtcgtaaacactggactgtgagagattgcacttgaggcaatggggtgtgcctcaactagacgtctagctcacatcccatcctacctccaccctgaggctggggccgcatcttaccatgtgtctttttattgcaggttggaagaatgtgggttaacgagcacctgctgtaaggatctcgcgtctgttctcacctgcagtaagaccctgcagcwgctcaacctgaccttgaacaccttggaccacacaggggtggttgtactctgtgaggccctgagacacccagagtgtgccctgcaggtgctcgggtgagctggggtctgttgtgctctatgggcagagtgctccgggctaagaagggattggctgggacctgcagtgtaatcacgttgcatttaaaatgcaaatgatgttccttgtctcagggttgttgcaggagtaagaaccaagcaggtgagtataaaactcttaccacagtaagtggtgaacagtgaatgtccaacaaatggaaacac

SEQ ID NO: 61 - DNA, 401 bp, Homo sapiens
  misc_feature (401)..(401): S = C/G
gacccgaaaagagccatggaagccttcaatcttgtaagagaaagtgaacagctgttttccatatgccaaatcccgctcctctgctggatcctgtgtaccagtctgaagcaagagatgcagaaaggaaaagacctggccctgacctgccagagcactacctctgtgtactcctctttcgtctttaacctgttcacacctgasggtgccgagggcccgactccgcaaacccagcaccagctgaaggccctgtgctccctggctgcagagggtatgtggacagacacatttgagttttgtgaagacgacctccggagaaatggggttgttgacgctgacatccctgcgctgctgggcaccaagatacttctgaagtacggggagcgtgagagctcctacgtgtt

SEQ ID NO: 62 - DNA, 501 bp, Homo sapiens
  misc_feature (251)..(251): H = A/C/T
aggttagtgtatttctgctgtttcttcaaagacccgaaaagagccatggaagccttcaatcttgtaagagaaagtgaacagctgttttccatatgccaaatcccgctcctctgctggatcctgtgtaccagtctgaagcaagagatgcagaaaggaaaagacctggccctgacctgccagagcactacctctgtgtactcctctttcgtctttaacctgttcacacctgagggtgccgagggcccgactchgcaaacccagcaccagctgaaggccctgtgctccctggctgcagagggtatgtggacagacacatttgagttttgtgaagacgacctccggagaaatggggttgttgacgctgacatccctgcgctgctgggcaccaagatacttctgaagtacggggagcgtgagagctcctacgtgttcctccacgtgtgtatccaggagttctgtgccgccttgttctatttgctcaagagccaccttgatcatcct

SEQ ID NO: 63 - DNA, 601 bp, Homo sapiens
  misc_feature (301)..(301): R = A/G
taagctctaacatccaaaaaggcctctagacatccccaaatgtcccctggggggaaacgtcaccccaggttgagaaccactaacataaggtgacttacctgaagggtcccgttccttctgactgagggaggctctgcctcagacatcttctgtttgagaagacagcgtagtgcgtatatgtgttacaagtggctcgtgttgaccgcctgcctgtggaaagctcgtcctttcttgaccacaggtcggattacagcctcatctgttggcatcacatctgctctgtgctcaccaccagcgggcrcctcagagagctccaggtgcaggacagcaccctcagcgagtcgacctttgtgacctggtgtaaccagctgaggcatcccagctgtcgccttcagaagcttgggtgagttgagaatcgacttcgactcgagtatgtcacggagatgacctattcatctcacctctagctttcagtcgaggctaactgcacaagcaaagaattaacatccagagcagttgctcaacctcagcacttacagacatctcatgcagatcattcttcatcataggggttgttctgtgcgttgtagggtgttaagat

SEQ ID NO: 64 - DNA, 200 bp, Homo sapiens
  misc_feature (101)..(101): M = A/C
tgaagtccttgctggccttctaaccaacaacaagaagctgacgtatctgaatgtatcctgcaaccagttagacacaggcgtgccccttttgtgtgaagccmtgtgcagcccagacacggtcctggtatacctgatgtgagtggatgttgggggtgcctactgtggagggccatggcggcagttcaaacctgggcctattg

SEQ ID NO: 65 - DNA, 801 bp, Homo sapiens
  misc_feature (401)..(401): Y = C/T
tgtgtgtttgtgtgtgtgtgtgtgtttgtgtatgaaaacctaaagaaaagtaataaacagctatcttacaaaatttggcagcataccagtagtgaagttgctttacaaaccagatgagtaattaatggttcaattttgattgaacaaagaatcagaatgaggtttgaaccagaatgaagtgaattcctaacagaaaggaatttacttgtaattttcttattaaaggggtgcctttattttagattatcctaatgcatagtaatcagaatactaggtatctgtttaggtcttgtgtatttttaagaaattattcattttaatgcattgttcaacttttgcagtggccataatataattgtgataatgtaataaaatcaggaaacattacctgaagcagatgyttttgaagtcaccagaaaatagtcttctccaattccaatttaaatatggaggtaatttaccccttattttattaaacgatcacaaagatgttggaagcatttttcttaatgaaaaccaacaaaactttgcatattgtcaagttacgtaacttctctaagcctttgttttctcattggtaaaatatgtatggtaacattgtctccctcacgggatggatgtgatgagtatctgaggtaatgcattaaaaaggtaagcacactgtgtgtcttgtagtaaatacttaatatgttagggattattcaataatgtgcattattattttaacaaatatatctttaaatattaaattcccttagtcatatgtgagaaattgtgttggcttttaaaaaaacaaactta

SEQ ID NO: 66 - DNA, 601 bp, Homo sapiens
  misc_feature (301)..(301): Y = C/T
cgggcagccatctgactccaatagagagagagagttcttcacctttaagtagtaaccagtctgaacctggcagcatcgctttaaactcgtatcactccagaaattgttctgagagtgatcactccagaaatggttttgatactgattccagctgtctggaatcacatagctccttatctgactcagaatttcccccaaataataaaggtgaaataaaaacagaaggacaagagctcataaccgtaataaaagcccccacctcctttggttatgataaaccacatgtgctagtggatctacytgtggatgatagcggtaaagagtccttgattggttatagaccaacagaagattccaaagaattttcatgagatcagctaagttgcaccaactttgaagtctgattttcctggacagttttctgctttaatttcatgaaaagattatgatctcagaaattgtatcttagttggtatcaaccaaatggagtgacttagtgtacatgaaagcgtaaagaggatgtgtggcattttcacttttggcttgtaaagtacagacttttttttttttttaaacaaaaaaagcattgtaacttatgaac

SEQ ID NO: 67 - DNA, 511 bp, Homo sapiens
  misc_feature (256)..(256): M = A/C
cattatcctaaatgtgccatttggtggtccattacttcagacctttgttttttttgagggtaggcacttaagcttaacaattttttatctttaatcaatttttctccccatagatctctgtggtaagaagtgctactttagagacaaaacctgaatcaaaatatgtatcactcatcacgtcataccagccattttccttagaaaaggaggtggtctgtgaagagccgttgtctccagcaacagttccaggcatgcmtaccgaagacaatccaggaaaagtggaacatacagaagaactttctagtataacagaagtggtgactactgaagaaaatattcctgacgtggtcccgggcagccatctgactccaatagagagagagagttcttcacctttaagtagtaaccagtctgaacctggcagcatcgctttaaactcgtatcactccagaaattgttctgagagtgatcactccagaaatggttttgatactgattccagctgtctgga

SEQ ID NO: 68 - DNA, 511 bp, Homo sapiens
  misc_feature (256)..(256): R = A/G
ctagatgtctactcttcatttaaataattttggtatcctggtgaattctacttttcttcaaatatacatatctgggcaatgtggcatcttacaataaggctttccaatattaatgttagtttcttacaattgtcccttttacttttttattttcttacagtgcctacaccaactaatgttacaattgaatcctataacatgaaccctatcgtatattgggagtaccagatcatgccacaggtccctgtttttaccrtagaggtaaagaactatgggtgagtgtcactcttttatttatcctttttattccatttttgtttaggtccttggaaattccacaactgtgttctttcatcagccttcccacgtggcaaaacattctaaactgcttatagaggtccaaaagtactaaagatgcaaattctttgccaaatatttcttgcctcttatttcctcttccttatcagtattgaaatagagaagtatcactaaacttctgagattagcatga

SEQ ID NO: 69 - DNA, 1029 bp, Homo sapiens
  misc_feature (993)..(993): R = A/G
ttgagtgccaagtaaagatgtcagctctacggagcttacattttagaaggagaagaaaacaaatatcaaggtgtatattatagtgtacagcaaggtgaaaagtgccatgaaaaaacagtagggcggggtaaggaggaggagaaggtgtgttgcaatttaaaatttttaacaaaagttcatgatactcagagaattgaaacaggtgagatcattagacattcgcatgtttgagcacaagcgctgaaggacttagcaatgtggctgcagtggaataggagagatgcaaaataacagacaaacccagagaggtaagagagcagacctcttcatgagaggctgcctaataaactgatttgacactgaattgctgagaaggtaatgcaaatagtttttttctccaagaacaaagtagttcttggtcaagccgatttgatttgggctgtgggaatctgcacaaaccatttcactagctaagtctcaggttcctcaaatgaaaaagcagggactggaaatggcttttgaagtctcattctcttctaaaaatgtcaggctccaagacaaccaggtgaagtccaagagttagtaaaataaggattgtggctcggctgtggcctaatgcaaacttgcacaaccccaggaaaccgaaaaaaactggaagaagaattgcagaatggggtgccaggttgaaagaccttaacctttgcactcaaattcctcccacacccagaagtccaggtcccgaccgcacgacgccgtgctcactgctgggtgctgcgcctgagtccgcctcctgcggcttcccggacttgaccccgcccacgccctggtcccgcctcctgccgacgccggcacagaccccggtgacggaagtgacgtaaggccggggctggagggcagygctgggctggtcccgcaggcgctcggggttggagccagcgaccgtcggtagcagcatggctctcctctttctcctaccccttgtcatgcagggtrtgagcagrgctgagatgggcaccgcggatctggggc

SEQ ID NO: 70 - DNA, 401 bp, Homo sapiens
  misc_feature (201)..(201): M = A/C
tgaagtggctacaaaggtccctggggcatcacctgctcacctaggaaccaggagtactggatactgttccgttactggtaacctatctggatgtaaaggttcataagttacaatgctttttttgtttaaaaaaaaaaaaaagtctgtactttacaagccaaaagtgaaaatgccacacatcctctttacgctttcatgtamactaagtcactccatttggttgataccaactaagatacaatttctgagatcataatcttttcatgaaattaaagcagaaaactgtccaggaaaatcagacttcaaagttggtgcaacttagctgatctcatgaaaattctttggaatcttctgttggtctataaccaatcaaggactctttaccgctatcatccacaagt

SEQ ID NO: 71 - DNA, 601 bp, Homo sapiens
  misc_feature (190)..(190): n is a, c, g, or t
  misc_feature (301)..(301): R = A/G
  misc_feature (466)..(466): n is a, c, g, or t
  misc_feature (477)..(477): n is a, c, g, or t
agagtgatcactccagaaatggttttgatactgattccagctgtctggaatcacatagctccttatctgactcagaatttcccccaaataataaaggtgaaataaaaacagaaggacaagagctcataaccgtaataaaagcccccacctcctttggttatgataaaccacatgtgctagtggatctacntgtggatgatagcggtaaagagtccttgattggttatagaccaacagaagattccaaagaattttcatgagatcagctaagttgcaccaactttgaagtctgattttcctrgacagttttctgctttaatttcatgaaaagattatgatctcagaaattgtatcttagttggtatcaaccaaatggagtgacttagtgtacatgaaagcgtaaagaggatgtgtggcattttcacttttggcttgtaaagtacagacttttttttttttttaaacnaaaaaagcatngtaacttatgaacctttacatccagataggttaccagtaacggaacagtatccagtactcctggttcctaggtgagcaggtgatgccccagggacctttgtagccacttcactttttttctttt

SEQ ID NO: 72 - DNA, 801 bp, Homo sapiens
  misc_feature (401)..(401): K = G/T
tagtaagatatctgatggctttttaaaaattctaaaactttgtttttaatattactatgggacctttcattaaaaagaaatggcaacatctgattcacccattatcctaaatgtgccatttggtggtccattacttcagacctttgttttttttgagggtaggcacttaagcttaacaattttttatctttaatcaatttttctccccatagatctctgtggtaagaagtgctactttagagacaaaacctgaatcaaaatatgtatcactcatcacgtcataccagccattttccttagaaaaggaggtggtctgtgaagagccgttgtctccagcaacagttccaggcatgcataccgaagacaatccaggaaaagtggaacatacagaagaactttckagtataacagaagtggtgactactgaagaaaatattcctgacgtggtcccgggcagccatctgactccaatagagagagagagttcttcacctttaagtagtaaccagtctgaacctggcagcatcgctttaaactcgtatcactccagaaattgttctgagagtgatcactccagaaatggttttgatactgattccagctgtctggaatcacatagctccttatctgactcagaatttcccccaaataataaaggtgaaataaaaacagaaggacaagagctcataaccgtaataaaagcccccacctcctttggttatgataaaccacatgtgctagtggatctacttgtggatgatagcggtaaagagtccttgattggttatagaccaacagaag

SEQ ID NO: 73 - DNA, 501 bp, Homo sapiens
  misc_feature (251)..(251): R = A/G
atttgtttgggaagcctagcatctaaattgtccagaaaatacgtaaaggctaaaaaatcaatagataaggatgaagaatttgccggttctagtccacagagttccaaatccacagttgttaagagcctgattgataactcttcagaaattgaggacgaggatcaaattttggagaacagttctcaaaaagaaaacgtgtttaaatgtgattctctaaaggaagagtgcattcctgaacatatggtaagagraagtaaaataatggaagccgaaagccaaaaggctacccgggaatgtgagaaatcagccctcacccctggattctcagataatgcgatcatgttattctcaccagatttcactcttaggaatacattaaagtctacttcagaagacagtcttgtaaagcaagagtgtatcaaagaagtggttgaaaaacgtgaggcatgtcattgtgaagaagtaaaaatgactgttgcttcagaagctaaaatacagctg

SEQ ID NO: 74 - DNA, 200 bp, Homo sapiens
  misc_feature (101)..(101): R = A/G
gacgaggatcaaattttggagaacagttctcaaaaagaaaacgtgtttaaatgtgattctctaaaggaagagtgcattcctgaacatatggtaagaggaartaaaataatggaagccgaaagccaaaaggctacccgggaatgtgagaaatcagccctcacccctggattctcagataatgcgatcatgttattctcacc

SEQ ID NO: 75 - DNA, 601 bp, Homo sapiens
  misc_feature (301)..(301): R = A/G
taaaagttccagaaatgtgaagtacaaagatttttttgatccagttgaaagtgatgaagacatagcaagtgatcatgatgatgatctgggttcaaacaagtggatgaaattgctgaagaagcagcagaagaactaagcatttctgaaatgtgagtatttgaaccatcctttacattgtgagctggaattgtccaatcatgtattggtacttgtggttttcacatatgtttgttttaagaagttagattctctcctatcagatattctcaagatagccagaggaaagtctgtggatttaaarggacattagagatcatttaatgaagaaaaatattactggcagtagcaatcaaacatttcttgccaggaaccttgatttggttttgtaccccaaaaatcctgttatttttgtgagattgatggtttgtattatcaattgatgaataatttattttctatatattggacacttttgttctgtttcttacatagcatgtcacttaaatgataccttctcttccgtaatacctgaatgattttggaacttctgagtatttggttgcattaggcatataaaagaagaactttattaagggaaaat

SEQ ID NO: 76 - DNA, 401 bp, Homo sapiens
  misc_feature (201)..(201): R = A/G
ttccggggattccctttttagaaagattgaaggatgcaatggcaaatataaactcaatactatgaaaaattaatggaatttcagcctcaaagaacattttcctcccttcctttgtgtccttattctaatcctcctcccctggaattacacttttttatgtgttgactctacctaggctgttactatcagcctgaatggggrcgggatgagagtacctcctatccactaatttgcttaaggataagttctaagacgggctagaaaaaacactagacctggccgattctatcaagaacaatggcaaactgaacagaggcagtcaggaggccaaatgtctgattctttgttctgtacctttcagtagtctgcaaattttctaccaaaaaaaatcccaagaattt

SEQ ID NO: 77 - DNA, 501 bp, Homo sapiens
  misc_feature (251)..(251): S = C/G
tactcggctatttttttattttttaaaattttacttatagagatgtggtctctattttgcaggttaagcctcctttactcatcaaagtacttatttaattcatggtttaaaattataattctacattactattaacaaccataacttttagaaataattttatttctctaagttttttaataagtatcacttacatattcctaccaataagaaagccatttttgtcttgttatatatccaacaacgtcctstgtgtccacatttattaacatcccgtaaaatacaagaagtttctcctgacattttaaagattgatggtccaggaatagtccctatgaaaaatgcaatgattgtaaattctttgtgaaaacactattctcttaaacatgtaatgcacacacagataatatatatgaatgacgactcatcattcaaaacatatcacttaaaattagctaataatttatttataaataggattgttaatcactggaaacaatg

SEQ ID NO: 78 - DNA, 3333 bp, Homo sapiens
  misc_feature (3293)..(3293): N = A/C/G/T
tcccctgactcgctgagcctctcctggaccgtcccccagggccgcttcgactccttcaccgtgcagtacaaggacagggacgggcggccccaggtggtgcgtgttgggggcgaggagagcgaggtcaccgtggggggcctggagcctgggcgcaaatacaagatgcacctgtatggcctccacgaggggcggcgcgtgggcccggtgtccaccgtgggcgtgactggtgagtagtgcttggagtctcggggtaaccacctttccctcatgggtacctggtttactgctgtgccctttcaccaagccctgtgggtccagacttgtctcctgtgtcctgccctccctctgtgccctgtggctgtggcctatgctagcggtttgcttgttcactttggcgtggcctccctctaatggtcaaccactgataacctccaagagtgaaatatgtcaggcgcacaccaagcctgacttacgagaattttcctttctttccatcttaataacagcattctttgttataaccacatacacaaatgcacacaagaggaacaatccaacgtcaaaccacgttgggatgactaaataatttaggcaacatctataaaaagagctattatgccgccactgaaatgttttaacataagacccttactttataatgttacattgaaaaaagagagcctaggctgggcacagtggcttacgcctgtaatcccagcactttgggaggccgaggcgggctgatcgcctgaggtcaggagttccagaccagtctagccaacatggtgaaaccccatctctactaaaaatacaaaaattagccaagcatggtggcacatgcctgtaatcccagttacttgggaggtggaggcacgagaattgcttgaacccgggaggcagaggttgcagtgagccgagatcaccactgcactccagcctggcagatacagccaaactcagtctcaaaaaagaagaaaaaggagcccaaatttttgtaaggatgctaatcacaaccatttgaaagtaacaggcatggcaagaagactggaaagaaacacatcccacgggttgcctgatttgttagatagaatagaatattccagcacatttttttctgtattattctattctgcatagtccaaattttcttaaatggcaaacatttcttttacaatcagggaaagggaaaagagaaaatatataatgtcttctccttctttacactccatctgtcctactcctctatcgctcttgtggcttatttcatttatttccttcttttttttttttgagatgaagtttcgctcttgtcgcccaggctggagtgcaatggcatgatctcggctcactacaacctctgcctcctggattcaagcgattctcctgcctcagcctcccgagtagctgggattacaggcatgcgccaccacatctggctaattttgtatttttagtagagagggagtttctccatgttggtcaggctgctcaaactcctgacctcaggtgatctgcccgcctcggcctcccaaagtgctgggattacaggcatgagccaccgcgcccagccagacttatttcatttctaattatgaggaagttcaaaatttctagtccataagaaattggaggggtggagatcatgaggttaattgaattccaaatgctcagtcaggctgccttttctaagtcatcctcagccaggttgttatgcctggcttagagtatttttcgagaattcctaccgatggggaagaatcagccctgctgagaggcggtctcttgcagggcaggtcgccacctctgtggcaccaagtgaggtgcgagctcatctcccaaaggccatccagacagaggaagcactctcaatcggcatccccgattcctgggggagaggcctcatttccatatgcatgttcagaggaccatctgagtgttgggaaacagggggaatagggaaattattggaaaatgaacattagaaaaattcacattccgggggtaagctgtcctggtccacgttcagttttgtgttcctgtctccactgtggggaaccacagaactgacagaggacaggctgagggacccacccctgcccctcctgttctatgtgtattgctgccccacccccaccccacactctattattaattgttgtagcccagaatttctttctttctttttcttttttttttttttttttgagactgagtctcactctgttgcccaggctggagtgcagtggtgtgatctcagctcactgcaacctctgcctcccaggttcaagtgattgtcctgcctcagcctcctgagtagctgggattacaggtgcatgccaccacgcctggctaatttttgtattttcagtagagaccgggtttcatgatattggccaagctagactcgaattcccaacctcaggtgatccacccgcctcggcctcccaaaatgctaggattacaggcgtgaaccactgctcccagcccagaatttcttttttagcccacgtttttctagtgaaaataatacagcaacattatgtggaaagcttgaaaaacagaaaacaagaatctcatagtcctactttctcccccagctgccggcattaataacaatgtgtgtagtgcacattcccttcctgtattttgcatgcagagcgtgttttaaagttgcaatcagtgttcataaagttcttggcacttccttttttgtacacaagtacattgtaatcattcacctcacggctacacaaccagcattcatcatcgtttcaatggttatttgatgcgttgcggtgaaagcactataacaaaattaatcatcttctacgggtcatttgtgttcctgacacatctgctgtcatgaataaccccatcgtgagttcttccatgctataactttttcctgctttaataattttcttaggacagatgcccagaactgggattattgggtcaaaggaaatgagaattactttggctcctgacactatgtctcagttgccttctggaggtttctaacagtgcagctctgccagcagtacaggccgggggctcggggatacctcaccggctcttattccaagagtcactgaacggcgaacacaaagctgccccagccctcagcctgctctggaggggcgcatttgatgtatgacctctgttgacagcaccagcaaagcaagttgcccttaaacccttaaactctgtatccccctatattacctttcagccccacaagaggatgtggacgagacccccagccctacagaaccaggcacagaggccccagngccccccgaggagcctctcctgggggagctgacagtgaca

SEQ ID NO: 79 - DNA, 701 bp, Homo sapiens
  misc_feature (201)..(201): S = C/G
gtctatcatttggcaaataggaattacagttgcctttagataggcaattcttgataattctgtacaaaaatgggtaaactttcaaaccatcttttcctagacattaaagtatgtgtcctttgtggatgaatcccacattaggatggtgaaccagcagctactagggagaagtctgcaagatgtcaagggccaagaagtccsagtaagttaaatcattttgtcttttttttttttttaagaaaatttactgttaaatataaacacatctagaaacttgtacaaatcaaaactgatggattttaacaaagtaaacatactcatataaccggcactcagattaaacaattgaaaattactagcaggagtcccttttatgcccccctccaatcactaccctctctttctccttttttaatttttaaaatttggctgggcacggtggctcacacctgcaatcccagcactttgggaggccaaggtgggtggatcacttgaggtcaggagttcgagaccaacctagccaacatggtgaaacctcgtctctactaaaaatacaaaaattagccgggtggtgtggtggcacacatgtaatcccagctactcagaaggctgaggcaggagaactgcttgaacccaggaggtggaggttgcagtgagccgagattgtgccattgcactccagcctgggtgacagagcaaga

SEQ ID NO: 80 - DNA, 608 bp, Homo sapiens
  misc_feature (409)..(409): K = G/T
atagtgatatcaagtgcgaagaccaggccctgaagccagcctgacggttccagctgttaggagaaagtgaaggtgggtgccatggatctgatgatttcagtgattttctactcaagaaaaatgaagtctcggatgggcagagcttaactgccttaaaaacttggtacagggcaaggtgtgagtttcccggtgagactgtgtgaactgtgaacgggtagagtctgaaactacaaaccagatgtttccgggctccctcccgcctggtctggcctgtcttccttctgctgctatgcagttcatcctgggtccctgagggcctcgcagatgcttcactcgaaagattggagttgcagagtcccctgtggaggaattgaactgccccctctcgcaggaccccagctggcaaggktttgttcctccctggagggtagagaccctcactgaggccctggagaggggcactcaggggcagcagctcattcccaaagttctctggtggagctggggagtggcaccctgggaactctggggtttccccaccagctcctctctccagtctttggtgtccaggtacagtctccaggccgtggcttctcgagttctgtatg

SEQ ID NO: 81 - DNA, 1048 bp, Homo sapiens
  misc_feature (969)..(969): Y = C/T
tcctaacataggttaatatcttaaatcttaaaaaattaagtatatgaaaactgtccttttaaaattatctttatttggtggtaggagtggcttcaccttctcaagaaactgacagttcagtgattgacggcctaaaataccacatagaaaaacagacatctcttcccaaatgctgagggtagatcctgtcatttctggggaaagctactatttccctccccaaaacagcaaagtaacaaataagcgaaaaataattatacacaaagaaggaaacaaattattcaattattttaagaaaaaaaattgcaaaattttcaacatcttaaaatatgattggttatttctcaagacagaagcaacagagattaaaatgacataattaaggtactaaggtacacaagaagatagggttgttttaaagattaaaataacagaaattaataaatcaaaaataaaaacagaattaagtgcacattataatactctgctgtcaggactcagaactttccaaaggacagtcagaaataagaggaaaaattaaagcagaaaaaagtaaaatataaagtagcttactactttgccgaagtgtttcattcatttatagttactgaatatttctttccataacatttctaatacaacttttcatctttcccttctgttattactcctgatttttcactgcaacttcacaatataggtaagacagaggacacaacttctgttttagagatgaggaaattaatgttcaaaacatttagtgacttgcccaaaatcacagagctagagaatagcaaaagtcggactcagctctttaatctcaagactgtttgtaccacacctgaggagggggaggagggaatgggattgtctatctccatgccttctgaaagtctaaatctaagtaatgttacacttttcaatttttattataggtagtataaaatgtttacaaacaactgaagaacytccttgtaagtttcccatatatacaactcagtcctttttttactgacacctaataattgtacaaatttatgggatacat

SEQ ID NO: 82 - DNA, 601 bp, Homo sapiens
  misc_feature (301)..(301): M = A/C
tctttcccaaggtatcacagtatatgaccggcttctaaatttaatcctagaagaaaatattgagagtataagaattatgatcttttcatttgatcatttcaggattgtctttatatcttttatttgcaggtaaacaatcatggggcctggaaaatgaggctttaattgtaagatgtcctagacaaggaaaacctagttacaccgtggattggtattactcacaaacaaacaaaagtattcccactcaggaaagaaatcgtgtgtttgcctcaggccaacttctgaagtttctaccagctgmagttgctgattctggtatttatacctgtattgtcagaaggtattatgcagaaggctcccatcttctttcaccctgctcccctttcttcagtggttgattgcctgagctgcccttgctttcattccttccctagtcctttctggaacagttaaatttataaaatgatttgaataaaagtgatttggataaacttctaggaatactatcaggttgaggtctagctcattctgagctatttggatttacagttgcagggattgatttgtagctgacttagagaaaaacctagctttcctagtg

SEQ ID NO: 83 - DNA, 2001 bp, Homo sapiens
  misc_feature (1001)..(1001): Y = C/T
aaccacctttctcagaattgcctggaggaggtgcttgttaaagatgcaagccccttagtaccactccagatctgttgaaagaaagtatctggggatacagcctaggaaatctgcattttaacataattccttggatttttatttaagattgtgtttgaaaaatgtcaagatagaggcaagcaagaggatcacctaggagagtaaattagtaaaagatggcagtattagcaatctcattagtttgactacattcattccaaatttaagagtgagtcctaagttaggcttgtttccttgaactatgtgaggagaaaaagctttaactagcaaaagaacgtattaaacaagatttggagaaaaattccttttccaccttaaaaaaacccaatgtacaactctggattactcttagcttccttatttcaaatactttccagtttatgtacttgaaataaatacaacaacttctagaacagcttgcagttcagatctggcttttactaattgtaatcaaacataattctggaggaggaaagaaagaaaggggcaatgaaggaatgggagagaagaaagagtaatgcaggaatacattctaacggttccccttcaaggggcagcatggcagagggggctggggtggaaagtgggttgcaaaatctacgaagagttgcgatagggaagaaaccaggttgaggaagcagccagaatgtcaccctccttcctaaacatgtttttttctcctatgcagggccaccatctgtgcaagtagccaaaaccactccttttaacacgagggagcctgtgatgctggcctgctatgtgtggggcttctatccagcagaagtgactatcacgtggaggaagaacgggaagcttgtcatgcctcacagcagtgcgcacaagactgcccagcccaatggagactggacataccagaccctctcccatttagccttaaccccctcttacggggacacttacacctgtgtggtagagcacaytggggctcctgagcccatccttcgggactggagtaagtgtatggcagatggatggaattagggtcaaagcagagaaaatgagatgtggatcgatacatggtacatggtagacagcgaagtgctgaaaatggggactgagtctggaggaacttacggggggcttaggaccagaatggggaaatgggataaagaaatggaaatatttaggttggtgcaaaagtaattgcagtttttgccattactttcagtggcaaaaaccgcaattacttttgcaccagtttaatatttagtctgtgctattgctgctctggtggtgtggctgatgttgctgcgtctatgtttgagggtgagaggggagcgtgcttgctttgaaatgaggctgtaaatttggcaatcatattttcagaaccccaaattgtaatacactattctagcctccttagatttcaactattctggtgccagaagcagatgggagctgaaggaatgatgaaggttgaagaaggggggcttttcttggtgtggggcagtactgcatttggcctgctctaccaagcatacgggagtagtaaagccacggctggcagaccatttggcatgcatgctcaggggccagtggataaagaattacttacagttcaaacactgtttgaactcagtgtcgggagtagttaaaggtatcgtgagaagttgcacacagctttggggactcttggaaaagaaagaggaagaaatgaggaagaggaagggtgtctacaaagggccagagaacaggatctcagatcagctgctgtaaccaggtttccccttgtgggaagtgttgtttcttgctgggcagttgggaagggaatggagaacagagaagagagtggaaatcacatgctcacttgaactttcctggggaacgtctcctcacagcgtgcacaagagcctccctttagaaatggagtgttcattttatcatgggaaaagaatctgagtgggacatgattcagaacag

SEQ ID NO: 84 - DNA, 801 bp, Homo sapiens
  misc_feature (401)..(401): S = C/G
cctgccttcatggatcaccagctcacgtcatgttgccttctcttttctttgtgtgtgtgtttatttaagttatttttcttcctcctctcccttttctttttggccctccctccctccctcttctgccatgtaactggaggatgtgctatgagtttgcaaacagctggactgtcaggctgctttttttccagatgttcctcctctgcctccccttcccctcctctcccctccttttccttccttccttcctttccttggagcactgagcaccatttggaagcttgagagaaaccaaaattaaagagagaaagagagagcgtgcacgctcctgctttgtctttcctgtgtgggctgtttgcatccattgtctcctccagaggtctgggggtgtcactccaggsggatctcagccaggggctggaaaggcccccctgtcctccctatacggcacagccagagtgtctgcaggggctggcaccccacttcctggctgagggtgaactccagcttggggaggtggacctgggaaccatggggcaccttggccacggtgaggtgggggtgcagctgccctggagactgtagtgtactcagcccctcggcttccagcctctggctcagcacttgtgccatgctttccagtgtgggagagggtggggcacacagcacatgcgggcccaggaggaccagctttctaaagctcagccgagggggtgcatttagccccggggccaagagggcccgtctcagagctccaatggcagcggcctcctccccagcgcctgccagtcgcagcagggc

SEQ ID NO: 85 - DNA, 801 bp, Homo sapiens
  misc_feature (401)..(401): S = C/G
tgagtcaggaaacattttcagacctatggaaactgtgagtggatccattggaagggcaggcccaccacccccaccccaaccccagccccctagcagagacctgtgggaagcgaaaattccatgggactgactttctgctcttgtctttcagacttcctgaaaacaacgttctggtaaggacaagggttgggctggggacctggagggctggggacctggagggctggggggctggggggctgaggacctggtcctctgactgctcttttcacccatctacagtcccccttgccgtcccaagcaatggatgatttgatgctgtccccggacgatattgaacaatggttcactgaagacccaggtccagatgaagctcccagaatgccagaggctgctccccscgtggcccctgcaccagcagctcctacaccggcggcccctgcaccagccccctcctggcccctgtcatcttctgtcccttcccagaaaacctaccagggcagctacggtttccgtctgggcttcttgcattctgggacagccaagtctgtgacttgcacggtcagttgccctgaggggctggcttccatgagacttcaatgcctggccgtatccccctgcatttcttttgtttggaactttgggattcctcttcaccctttggcttcctgtcagtgtttttttatagtttacccacttaatgtgtgatctctgactcctgtcccaaagttgaatattccccccttgaatttgggcttttatccatcccatcacaccctcagcatctctcctggggatgca

SEQ ID NO: 86 - DNA, 801 bp, Homo sapiens
  misc_feature (401)..(401): B = C/G/T
accatgcagtcggtggtggagaaacttatcctcagggggcatgaggtggttgtagtcatgccagaggtgagttggcaactgggaaaatcactgaattgcacagtgaagacttactcaacctcatacactctggaggatctggaccgggaattcatggatttcgccgatgctcaatggaaagcacaagtacgaagtttgttttctctatttctgagttcatccaatggtttttttaacttatttttttcgcattgcaggagtttgtttaatgaccgaaaattagtagaatacttaaaggagagttcttttgatgcggtgtttcttgatccttttgatgcctgtggcttaattgttgccaaatatttctccctcccctctgtggtcttcgccaggggaatagbttgccactatcttgaagaaggtgcacagtgccctgctcctctttcctatgtccccagaattctcttagggttctcagatgccatgactttcaaggagagagtacggaaccacatcatgcacttggaggaacatttattttgccagtatttttccaaaaatgccctagaaatagcctctgaaattctccaaacacctgtcacagcatatgatctctacagccacacatcaatttggttgttgcgaacagactttgttttggactatcccaaacccgtgatgcccaatatgatcttcattggtggtatcaactgccatcagggaaagccattgcctatggtaagtcacctctcctttagcacattaggaataatctggctttggaaattaaaaaaagattcc

SEQ ID NO: 87 - DNA, 501 bp, Homo sapiens
  misc_feature (251)..(251): M = A/C
atgtggaacactcctttgccacctagaataatcaggaaaggtgacccatgccctgtgcctccttaacagactttcaggtacttgggaatttgaaacaaatctccttgatgcacaaagtaaccttttcttcccccattgtaccccaggttgaaaatcgatgactttaatgatgaactcaataagctgctggaagaaatagaagaaaaaaacccacaactgattattgatactgagaaacatcatccctgggmagaaaggccttcttctcatgacttcatgatctgaatccccccgagtcattcattctccatgaagtcatcgattttccaggtgtgggtgaactgcctgtgactcctctcctcccccgcccctacccctcagggataatgagttcattgctgggctagatgttttagccatgattctgcctctgttttatacctgcacacgtccttatctttgttacatatgaaatatctgtatcacgggtatattgagaga

SEQ ID NO: 88 - DNA, 601 bp, Homo sapiens
  misc_feature (301)..(301): R = A/G
tggatgggcagcagaacaaggccatagatgagctggggcaggagagccatgagccctagtgtggaggtggggaaaaggaggacactcccagtacctggtgggacaacctgggtgctggccccaaggggctcctccagagagatgtgtgtgacctggcaggtgtaagtggcacctgcagagccaggttctgcggtgagagaggaggagatgctgtaggtgcctgccacgctttgcctgaggctggagaaggaggcaccagagacttgggctggggatccacccagctcctctcgggtccacrtcaccaccacatccagagggtaatagccagcaatgtcgcagatgagggtgggcagcagagcttcgtttgccaagctcagtcgtactttaggggaagctggagaaagaatgaggaataagattacacatggatctaactggggacagcggaggagcctgaagccttttcttcctgccaagatgagagtagattgtggaggctacagtgtcccttggtggtgtaccaaggcgggggtgtgtgaggggcccacctggatgcaggccgtaagggggcagggttacattttccagaaaacagata

SEQ ID NO: 89 - DNA, 801 bp, Homo sapiens
  misc_feature (401)..(401): M = A/C
agatgatagaaagcatagtaactgattcccctggccctgctgggtcttgccaattgacaggatcgtgggggtcctccctgcaagcccccagcacctgaagatgaggatgaggcatggcggcagcgacgaaagcagtcgtcatctgagatttccctggcagtggagcgggcccggcgacggcgagaagaagaggagcggcgcatgcaagaagagcgccgggcagcctgtgctgagaagctcaagcgactcgatgaaaagtttggggcacctgacaagcggctcaaagcagagcctgctgccccacctgctgccccttctaccccagctccaccacctgcagtccctaaagaactccctgcacctccagctccacctccagcatcagccccaacaccagagamagaacctgaagagccagcacaggcccctcctgcccaatctactcctactccaggtgtggctgcggctcccactctggtgagtggtggtggcagtaccagtagcaccagcagtggcagcttcgaagccagcccaggtatggagatggggataggtactaccagatgtcagatcactgcttcaaggtgcttaaaggtgcagggtggtaaggctggggataaatgaagtagaaggcagttgttttggtttattggactatcagtgatagtgttctatcatttgtatatctgaaggagggaaggttttgtctggaatcttaggttgtagtctaataccatttcttggcagagtactgtagctcacgcctataatcccaacacttagggaggcttggggtggagg

SEQ ID NO: 90 - DNA, 801 bp, Homo sapiens
  misc_feature (401)..(401): S = C/G
gtcctcaggttacagagcagaggatgcacaggctgtgccagcagtgaatgtttgccctgaatgcacaccaagggccccacctgccacaagacacataggactccaaagagtctggcctcacctccctaccatcaatcctgcagaatcgacctctgctggccggctataccctgaggtgctctctcacttcctccttcaggttctgagcagacaggccaaccggaggacaggattccctggaggccacagaggagcaccaaggagaagatctgtaagtaagcctttgttagagcctctaagatttggttctcagctgaggtctctcacatgctccctctctccgtaggcctgtgggtccccattgcccagcttttgcctgcactcttgcctgctgccctgascagagtcatcatgtcttctgagcagaagagtcagcactgcaagcctgaggaaggcgttgaggcccaagaagaggccctgggcctggtgggtgcacaggctcctactactgaggagcaggaggctgctgtctcctcctcctctcctctggtccctggcaccctggaggaagtgcctgctgctgagtcagcaggtcctccccagagtcctcagggagcctctgccttacccactaccatcagcttcacttgctggaggcaacccaatgagggttccagcagccaagaagaggaggggccaagcacctcgcctgacgcagagtccttgttccgagaagcactcagtaacaaggtggatgagttggctcattttctgctccgcaagtatcgagccaaggagctg

SEQ ID NO: 91 - DNA, 601 bp, Homo sapiens
  misc_feature (301)..(301): M = A/C
tgttgactacataatatgtccaaaagaataacgcaaaagtgctagatgaccaaactctgaggccaggctttggggacatcactttaaaatcactcctctcatagtagtagaatctcaaatacaacaaagtctttaaatggctttggcatttaaaaaaagtctattgaaaataaagactgaccaatctgcagggagccgacagagatggctacctgaaatacagatgtcacctgaaatgcaatttgtaatggaaatacctgattttcttacctggcttcatcaaaccttattcagctgttgmttccccttctggttcaatttctggtgcagtaaggccttctggagcaggagggaaggggccactagatgactttacagatgtacctgagtgcactgcttctgcagcttccccagagagcacaggtttgccttccatctcctggggtacagagttttccccagactcctcctgcccagtattgtcagagactattgaagtgatctccacttcaaggtgcagagatttttcagagcctattttgatagcaccttctgcatccaggagttgtgcaggtacctcaggctgacctttcaaagatgt

SEQ ID NO: 92 - DNA, 601 bp, Homo sapiens
  misc_feature (301)..(301): Y = C/T
atagcgtaattgaaccattctttcattaaatagttctgtgccttttacttttactggagtttgaaaagacaacaatcagaccaagtccccacttcaaagtcccaccttatggccctgccctcaccgggaaaggttctgctccttcctggataacaaagccttcaatgatgtgggtgagaatctggggcttcacgatggcctgtgggggttttgagtcacccatttgtctagacaccatggctagtgtaggaggcggtactgaaggggcgggggtcaaggctactagttcactgcttggagyattagcattcacattagccactgattcagctttttctggaaaacaaacacagattaagcaacagacatgagatgacatattgatccatctattagttgagccagcatgatcttccataataatctatgtccacccttgacaattcacctggattccctgtttttggatctattcatttgtccaccaacttctggcccattttctactcaaccagatttatcttttagctcactcagaacattcctctactctgtgtgctctccaacagcattagaagtcagttactcacctccaagactg

SEQ ID NO: 93 - DNA, 601 bp, Homo sapiens
  misc_feature (301)..(301): R = A/G
tctccagtgtgaactctctgatgatcaataaactgagacaacttgaggaaggctttcccacattcactgcatacatgggcattctctatgttgtgagttctctgttgcttaatgaactgggacttattaataggttttgcaattgcaggaaacttcatttcagtataaaattgtttatggttagcatgaaaaagggatttcccatctctattaaactcagcagagttctttaggccagagctccttttctggttttcaaaacttaaatttgattttaaaggtttttcatgtaagtcaaacrtatcacaatcttgcttcagcaggaaatgacctttgttctgattaacaatatttccaaacatattctgttcatggcactgtttcacactcttctgaatactttgattttgcaagtgatgctgcagaggatcatcaattttcctgatttctaggaaagaagagaacagtcaatcactccatcatcttgttttgaaataaactatttaaactattttttaaaactgccttggtgtgaggtgactctttagtgaaaaccctattttatttatttatttttttgtgagcaataaagctttttaat

SEQ ID NO: 94 - DNA, 401 bp, Homo sapiens
  misc_feature (201)..(201): N = A/C/G/T
tgtatcctataatttgccccatttccagtgagaaccagcgtaaaacatttctagaacaaacagtatattgcacaaggatagatttacaacaaaaactagtttttctaagacttgaagccttctgtcttttatcacagggggacccaggaagcccaatgatgtgccagctacagcagttcgatctgtgggttctgagaggantcctgaacttcggtggtgagacgtgccctggcctgtttctgtacaccaaggtggaagactacagcaaatggatcacatccaaggctgagagggccggccctcccctgtcctcactccaccactgggaaaagttgatttctttctcccaccatggaccaaatgccaccatgacacagaagacatattctgattctgaactg

SEQ ID NO: 95 - DNA, 601 bp, Homo sapiens
  misc_feature (301)..(301): S = C/G
aatgagacatttcaagtggggacaagcatggggaaatagacatctcccacctcacctgtgtccatttcctctcctttctcttgcagcaagtcaaaaccgtgagatttcagaattacagccctcctcccaccaaacattacacctcccatcccacctccggaaagcctgaacagccagccaccctcaaggcgtcccagcctgaagcagcgtccttgggcccagagatgaccgtcctatttgcccaccgaagtggctgccactccggacagcagacagacctccggagaaagtcagctcttgscaaggccacaaccctggtgtccactgcctcaggcacgcagaccgtgtttcccagcaaatgaacctacgggtggcttttcctagaccccaaagaggtgaattgcatttaaatacagtctgcctccactgagggcatcctgccattctttggggacttgagcatgggtccttgttcttcctatttcacctccaggaaagcaaaagtgggagcagaaattcctgccctgggtgggaggatagatggcgtggccttccaaacatacaaacataatgatttgatgccacaaagctcacttactca

SEQ ID NO: 96 - DNA, 601 bp, Homo sapiens
  misc_feature (301)..(301): N = A/C/G/T
ttggtagaagagacatgcatgggagaaaggatgatgcacaaaagcagcctgttaaaaatcagcttggattaaacccgcagtcacatctaccagaactgcagctatttcaagctgaagggaaaatatataaatatgatcacatggaaaaatctgtcaacagtagttccttagtttccccaccccaacgtatttcttctactgtcaaaacccacatttctcatacatatgaatgtaattttgtggattcattattcacacaaaaagagaaagcaaatattgggacagaacactacaaatgtantgagcgtggcaaggcctttcatcaaggcttacattttactatacatcaaataatccatactaaagagacgcaatttaaatgtgatatatgtggcaagatcttcaataaaaaatcaaaccttgcaagtcatcaaagaattcatactggagagaagccatataaatgtaatgaatgtggcaaggtcttccataatatgtcacaccttgcacagcatcgcaggattcatactggagagaaaccatataaatgtaatgaatgtggcaaggtctttaatcaaatttcacaccttgcacaacatca

SEQ ID NO: 97 - DNA, 501 bp, Homo sapiens
  misc_feature (251)..(251): W = A/T
agcaactggcaaccaaagcccattattcctgcatgaacccctcctgaccacactggcaggggcaacatggtggccaacctgggggagctggccaagcttcgagacctgcccaagctgcgagcgttggtgctgcttgataacccatgcacggacgaaaccagctaccgccaggaggccctggtgcagatgccataccttgaacgcctggacaaggaattctatgaggaggaggaacgggctgaggctgatgwgattcgacagaggctgaaggaagaaaaggagcaggagcctgagccccagcgtgacctggaacccgaacagtcattgatctagcagcagttctagcctctaaagatagtaaggaagcctgcagggaggcagtgggaggaggccaagggctgggcaggtaggggaagaggcaagaggggaagctgctgcagaaggaggtgggagaggaaagcatcagacaagcaggacccttaaagagaggagggttaggag

SEQ ID NO: 98 - DNA, 801 bp, Homo sapiens
  misc_feature (401)..(401): D = A/G/T
cttgtttttcttaatggcaatgggaaaatgtattttgctggatttcccttaagataaaagacacatttttgactcctgtaatggtcattctcatagaaaataatgaagccaactaaatgttttaaatactgaatcccttacctctttcctagttgttgctgctgtgcttcaagtaactgaattgattttatctctaggctatccaagatgtattctcatacaagactgacttagagtattctttttactaggttggctaatagcagttaaattatttgtgccaaattgtgtctcacagtttgattttaagatgtgtatgttttattcttttaatattcttttgctgatttgaaacctacaggaaaacaattttgataatcttgattttgatttggatttgdtgccttgggagtcagacatttgggacatcaacaaccaaatctgtacaggtaattatgtgtttcactggtaaaagttttaaaaagatcaattttattttgtagtttggtcatactcaaaattaggtggggttattgggctattctggtaggttaaaagattcctggtgttatgcattctacttctggtatggcaattatgtaaacaaatttcttgccaaaaatggatatgaggagtttcatagttatgtttcagtagtgtaatgaatgaacagttcatatcagaaatagaaatagtgattttgaattatgaataatgtctctgtataagattaacctgagaaccagacagggcttagggaatcaaagggaagagcctgggttaccagaacctaggaacttg

SEQ ID NO: 99 - DNA, 801 bp, Homo sapiens
  misc_feature (401)..(401): R = A/G
cgcagggcagccccacgcgtgctgttcggagagtggctccttggagagatcagcagcggctgctatgaggggctgcagtggctggacgaggcccgcacctgtttccgcgtgccctggaagcacttcgcgcgcaaggacctgagcgaggccgacgcgcgcatcttcaaggtggggaccccagccccgccccgccccgggtgggagagcccgcctaggaccccgcgggcccggcacacgtgttctgtccccctcttcaggcctgggctgtggcccgcggcaggtggccgcctagcagcaggggaggtggcccgccccccgaggctgagactgcggagcgcgccggctggaaaaccaacttccgctgcgcactgcgcagcacgcgtcgcttcgtgatgctgcgrgataactcgggggacccggccgacccgcacaaggtgtacgcgctcagccgggagctgtgctggcgaggtgagcgacgccggctgccaagggcgttggcattcgtcctgcttgggcaaaggggaacattctctgggtcagatttgtggttttagaagctgttctgggagaggctgccagcaggcccaggacaggtggagagccacatccccacctcctcaggccacagcctaagggttcacagccaggaagctggtgggggctacaccaggctctccttgtatctctcactctggtgtcggggcctaacgcctgccccattctctctcagaaggcccaggcacggaccagactgaggcagaggcccccgcagctgtcccaccaccacaggtacccttctct

SEQ ID NO: 100 - DNA, 801 bp, Homo sapiens
  misc_feature (401)..(401): K = G/T
cacggatatttgcaggccccaccagatgtgagtagctgagtcctttggttctggaggagcagggaggggctgtccctgggtgactgtgggtccaggacacagagcagctcaccaaccaccattgtccagactgctttatctgagggtggctcccaggataaatggcatggtgggcaggaccttgccctggaaggcaggactgggtgggtgcatggggaggtgggggagggctaggagggggtggtcctcagagagggcacacatcgtcactctcctatcctgcctgctggggcccgtgaatgagcccagccaccccagccactctgtcccctgctgcctcctgaccaagcctcctcctcctccagctgtaacgtggtggccatccctgggaatgcaagcakggatgcagtctgcacgtccacgtcccccacccggagtatggccccaggggcagtacacttaccccagccagtgtccacacgatcccaacacacgcagccaactccagaacccagcactgctccaagcacctccttcctgctcccaatgggccccagccccccagctgaagggagcactggcgacttcgctcttccagttggtaagtcgcaagaagtctcattcattcactccttctgtctgcctgtctttctgtctctctttcttcctctcccatggttttactgagagcccacggggggctggaccctgtgccctgtcctgggatacaggtggcagtgagactgctttctccccacacctggtgctatcattcaaaatccctaagtgcgtgggctggat

SEQ ID NO: 101 - DNA, 741 bp, Homo sapiens
  misc_feature (401)..(401): W = A/T
gagttttacaagaaaataatgaaggactgagagcatttttactcactattgagaatgaacttaaaaatgaaaaggaagaaaaagcagaattaaataaacagattgttcattttcagcaggaactttctctttctgaaaaaaagaatttaactttaagtaaagaggtccaacaaattcagtcaaattatgatattgcaattgctgaattacatgtgcagaaaagtaaaaatcaagaacaggaggaaaagatcatgaaattgtcaaatgagatagaaactgctacaagaagcattacaaataatgtttcacaaataaaattaatgcacacgaaaatagacgaactacgtactcttgattcagtttctcagatttcaaacatagatttgctcaatctcagggawctgtcaaatggttctgaggaggataatttgccaaatacacagttagaccttttaggtaatgattatttggtaagtaagcaagttaaagaatatcgaattcaagaacccaatagggaaaattctttccactctagtattgaagctatttgggaagaatgtaaagagattgtgaaggcctcttccaaaaaaagtcatcagattgaggaactggaacaacaaattgaaaaattgcaggcagaagtaaaaggctataaggatgaaaacaatagactaaaggagaaggagcataaaaaccaagatgacctactaaaagaaaaagaaactcttatacagcagctga

SEQ ID NO: 102 - DNA, 511 bp, Homo sapiens
  misc_feature (256)..(256): Y = C/T
gaggcatgaaaatcgctggaacccgggaggcagaggttgcagtgagccaagattgtgccagtgcactccagcctgggcaacaagagcgaaactccatctaaaaaaaaaaaaaaaaaaaaaagaagtagagtttggaacagacaaatggaaagggatatataactgaatgtcatttcttccttccttttctagtttgctgctgttcagttttccacaagctacaaaacagaatttgatttctcagattatgttaaayggaaggaccctgatgctctgctgaagcatgtaaagcacatgttgctgttgaccaatacctttggtgccatcaattatgtcgcgtgagttcccttttgcaggagagcacgtgtcctgtgatttgttctgggtgatctacccacttccagctgcagggcatgggaactcagtaggtaggtacagcaaggggcagtttattgtctgaattgaagtggaacaattttactgcagattcttttggttgtacgtaacagaa

SEQ ID NO: 103 - DNA, 501 bp, Homo sapiens
  misc_feature (251)..(251): Y = C/T
aacagaagtgattttttactagctcaagttgtcatcctcatatacatttttttccctttgtaccccttccaaacatacaattatttatgtaacaacatctaactaggttagggaaacacaataataaataatactgtcttaaaagagctctaatttgtgaaaaagaaatataatcacatggttaagagataatatgattaatgctataatctatataattatttttagaaaatgaagaatgaatgcatacygcctgaaggaagaacaggcgtcacacaggtaatgcttaaaatgtgttttaaagaacaggggaagaaatggtttacatatagattaggggcttactttttaaaataagtaatagcatgaagagaggcaaaaaaaaaaaaaaaaaaccacagcaagtatattcagagaaatatggaagctgagggtatttattagatggcttggagtatataacagggctttggacacgtaagtgaaattatacatatatat

SEQ ID NO: 104 - DNA, 842 bp, Homo sapiens
  misc_feature (249)..(249): Y = C/T
ctgctgcatcttctcattgcatcctcattccatttcaggttaaattttggtgttggactccttagaattctacctacagcatctctgacaaaagcccgccaggctccgcttgactctctgcccggtgcgctgtcagatggcgccaagcccaagctctttcctttgcttcctgtagaagcccgtcctagagccctgggctgtgaggaggagcagccccacagggtcacactgtccttttcccttgcagaycttggcacccgccatcaactggttgccttttctcaacaccatcttctaccccgtggagatcaatgaatccgagcctattgtggtctatgacaaggaataccttgagcagatctccactctcatcaacaccaccgacagatggtaagaggacccccagtggcctggggcacgcctctcacagacagccctcttcttgggcaggtgggcaggggtggggatgacagtctgactcaggagagtgggacctgggcgggcttttacgagaggcagcaggacatcctggttacaggcacaggtttaaatcccagcctctttcaaactaccagctttgtagccttgggcaaatttcgtaacctttcttaagttcattctcctccttcataaaatggtgatacaaatatcacctgtggccgggcatgaacgcccgtaatgcgggacttttgggagacagaggcaggaggatcccttgagtcccctgcgtttgagacccagcctgggcaacatggcgagacgtgtctctacaaaaaataaaaaatagccagacatggtgtcgcgtgcctgtcacccagctcttgagagaggaagctgaagtg

SEQ ID NO: 105 - DNA, 801 bp, Homo sapiens; identical to SEQ ID NO: 22
  misc_feature (401)..(401): R = A/G

SEQ ID NO: 106 - DNA, 888 bp, Homo sapiens
  misc_feature (501)..(501): R = A/G
tcttcttgcagtggctcatgcctataatcccaaccctttgtgaggttgatgcaggaggatcctttgagctcaggagtttgagagcagcttgggcaacacggtgaaaccccatctatacaaaaaatacaaaaattagctgggtatggtagcacatgcctgtagtcccagctacttgggggactgaggtgggaggatcgcttgagccccggaggtcaaggctgcagtgagccatcatcgcaccactgcactccagcctgggcgatagagtgagatcctgtctcaaaaaacaaacaaagaaaaaatgacttctcctttatactttaaaaacagtatgtcactgttaaaagtcagcttcagttatgactttcagaaaaaaatctgtttcgtggaataaaaccatctgttgacaaataattttaatctatatataattttaaatgtgtaaaattttagttctccaccttcatctatggaagataaatcagatgttggttatggacraagtatttcttcttcatcttccttaagaagatcaagtaaagaaaagaacaagtaagaaaatgatgttttatctgtatgcaaacagcttcccctttaatttgagtgtgaaaaaatgttttagattttagattggggcaacttgatttttattcttcttatggtaatacaattgcataattgccttttacattgctatgggaaagatctctggaataggagccaggaaatctggtttcaccttctatttcgccctgtggacctgcagtgatttgggccacatgacttagtgtctgtgtgggtttcgtttccttagctgtggacgaaataacaccgggtccctggcttcatcatggggaaaggaatcaagttatataatgaagtaaaaat

SEQ ID NO: 107 - DNA, 601 bp, Homo sapiens
  misc_feature (301)..(301): W = A/T
agcctccatagtagctgggattacaggcacacaccaccacacccagctaattttttgtatttttagtagagatggggttttgctatgttggccagactgtagtaagtcgtttttatagtgtacatcttggaggaaagaaacaaaagattaatgttgactaagtgggctaagaagaggatcaactgtcacaacaggatccatttcttggctctggttaagattgtttcatttttctttcactcacctgtctcatagtaatcatagactttaacaattgctggcttcaagtctcctactgggwtgtcttgcagaaccatgaaggaaaaacttagcgtctgatttgtcacctgaaaggaaaagtgggagtaatcaagaacctagaaaacctccttctttctcccatgagcaaaacatattcttattgttctttgactctttttcaccagtgtctttaggtgaccagacatttgtggatgtcaagatgggttttagaatgcatccttgggaactctatttacagtcaacaaattttcacagattttcttctaaacaactgagccaaccctattcttttgtagtcccttgttatgagattaactct

SEQ ID NO: 108 - DNA, 601 bp, Homo sapiens
  misc_feature (301)..(301): R = A/G
agagaactcacactggagagaaaccttacaagtgtaatgagtgtggtaaaacctttattgggcattcaagcctaactaaccatcaggtaattcatactggagagaaaccttacaaatgtaatgagtgtggaaaggcttatgtgaagtggtcccaccttagacatcatgagagtattcaaactggagagaagccatacaaatgtaccaaatgcggcaaggcctttagacaatgggcggacatcaggattcaccaaaaaatctatgctggagagaaacctcacaagtatgatgagtgtggaaraacctttacccaggcctctcacctcactatacatcagattatccatactggagagaaaccatatgaatatgacatatatggcaaagtcttcagtcaaaattcacatttcaaaagttatcataggatttgtactgaagagaagccttacaaatgtgtgtggcaaggtcctcagtcaaaattcgcaccttgtaaatcatcagagaattcatactggagagaaatcctacagatgtcatgaatgtggcaaagcctttactcaaggctcacgcttcattaatcatcagatagttcatactggag

SEQ ID NO: 109 - DNA, 501 bp, Homo sapiens
  misc_feature (251)..(251): N = A/C/G/T
cacaggtggcaatagccactgtgtgccacaacttttcaatggcaatgtctggttcactggctgctgattctgtgtcacattctgcaaattccatagggacgatgcctgccttctgccaacatttcaccactgtggatggcttgactgaccaccacgctgcagcaatcatgtcgatggcctgcttgatgtccacctcttctgatcctcactgctgttgagcttgaggaggatctgttttagaaggtggctcnggtacagtactttcatggtgtgaattatgccaagattcagtggctgcaggacagcagtacagttggagggcagatacccaacctgaatcctttccaagtgtggaagcatgttatgagcagagcagttgtctatgagcaagaggatccggcgttccgccctcttcatcctggcatccacttgcatcagccactcattaaacagatcccttgtcatccaagcccactggttggctcggtaatcacaagggag

SEQ ID NO: 110 - DNA, 838 bp, Homo sapiens
  misc_feature (501)..(501): Y = C/T
ttcaccatgttggccaggctggtcttgaactcctgacctcaggtgatttgcccggctcggcctcccaaagtgctgggattgcaggcgtgagccaccatgcccagctcccatttttactttttatactgtattttcactctaccttttctatgtttagatatatttagatacacaagtacttcatattgttctacaattgcctacaaccttcagtacagtaccatgccgtgcaggtttgtagtttaggagcaatgggccctaccatacagcctaggtatgtaggagccaatacgctctaggtttgtgtaagtacacactatggtgttttcacaatgacaaaatcacctaacgatgcatttctcagaacatattccagtcattaaacaatgcctgactgtatatttgctttgtagaccagtgaagaagtgatgtctttgatgagttccctgagagttcccagccagtggcagagaaatatcacatataagtcaaaccctaatyggatattgcctgattctgtggactggagagagaaagggtgtgttactgaagtgaaatatcaagtgagtattaccatcccaagcctctgaaccctaggtagagctctttaaatgcttagtctagctacagaatttgacagtgaatcttacagtcccacgtgttactttctagttatttttgttattcttgtcttcccaactaaattataagttccttaagggcaaggatcacatattatattttatttatacagttggccctccatatccacagcttccacatctgcagattccaccaaccgtggatcaaaaatatccagaaaaaaatgaaaataaaa

SEQ ID NO: 111 - DNA, 801 bp, Homo sapiens
  misc_feature (401)..(401): Y = C/T
cattctatttatctcaacttcccattaattatatcactctccatcatttttatgatatgattttgtgttattgatatttattaaggcatattagtattctgtagaagactgagtatatttattgtactaaagcaaacagatttcacttaactgatgatcacagcacttgaactcaatcttatttaataagaccaagaagtcctggcatttgttttagctttgctttcattggttatacataaaattatgacttacttttaaaatgtgttcttcagctttggcttgcttcgtggcccctccaacaccaggtgaagctgttagtcccagtatctgaggaaggggaatcactggtttgttttctttcttgagtctattgtttttcaacttctgcatcaaataaygcctcatgatgttattatacactgcttctttgttggtgtgatgacattcatcaatgataatgagggaaaagtcttaaaagaaaattcaaagagttcatttctccatatcagcacactacagtgagaaaatagctttagaccagtaattgagctgccttggggatgccttctcttgggcacgacacaagagcagtccactttcagtttttaggagggaaatctaactatactagcacctgtacacacagacgttcgtatatactaatcatgaaactccctgttagacattctccttctttaatagataagattcagaaagtttacagagctaaaaagcgttagatgtggaattcacaccctggcttattacaaaacaaatctcaggattttacttttgttc

SEQ ID NO: 112 - DNA, 601 bp, Homo sapiens
  misc_feature (301)..(301): Y = C/T
gtcctcacattagtaaatgaaaaatcagttttgagcttaagtgacatggcaaagccactaagctacctagccacagagtcccaaaaagaatagttttcttgattctgatcccagtactttttccataataatacacagctgtccataagcaagccggtttcttttctttttcctttctgcttagaactcaccaaatctacaagctactgacaaatgggagttttggggaacaacttacctttaattcctcgattcattttcattaaacgcctgattatggaatcacagttatctccttgcytgatttcaattttggttgagaagtggccattggatggctggggattcaccagagaaacggacacaccaggctaggaaaacaacaagaaaatgattgtttaacttgaatactgctgagggaggaggaatctctgctacgttttcaatgcccaatgaaagacagatctaattctggtattttaaaatcatgactaaggagtactcaaatatgaaagaaaagctgtacaagctcatgcttataaccaaatgcctaggtaaagatgactacaactacatatatcaacaccaatgatggacacta

SEQ ID NO: 113 - DNA, 851 bp, Homo sapiens
  misc_feature (102)..(102): R = A/G
ctggcgggagtctggggggcacactgcagaccactggccgttgcttagaattgggtccaaatgtgacgagttcatttggaacagaggccttgctgggttccrgttggttgaggttgttgcaggagctggcactcaatgggttgagctcgatggcaggcatggcttgggtgtcaacaccaacactcctggccaggaggtctgggtcctccatggccacaggcttgtgagacttgcaacggcggcagtagaagagaagcccgacagtgcttatgataatgaacgccacggccactgtgatgatcagtaactcctgctgcccccagtcccccctttggatctcgggagtgactaggcagtgtccttctgaacaacccctcgcctccatttcacacctgcggagacagagaagtagtcagggggccaagtcatgaaattgccctttccatgtcccctcttacagagatctatgggatagagactgctccccccaaaacctaccatctcccgtttttcaccccccaaaaaagtaactatcaagcatatcaacatcagaactttccaccttccaccagtaaagtatgggtctcagctacatcctcatttgtgaccattaggatctgggaatgtctattatttttccagcatgagatctaggcactgtatacactctctatcatgaggtcgattttctccatatcactgcagtagagacatcgactctttagcatgatgtcaggggtcaaaatacagttagcattgcccagtattagcagccaggccccatgttccctgctgtgctttaacaggaagtacagagccaacgtgtccttgcagatcgccaccttacatgg

SEQ ID NO: 114 - DNA, 401 bp, Homo sapiens
  misc_feature (201)..(201): Y = C/T
ttcatccgaatccatctgaagagcattgagcaaattctgcacaaagacacatccatattacttgttgaatctagctatcctactttgtacaatattgcatactaatgttaaaaatgttttacttacattatattcttttacttttatagcatcttgttggacttgatcctcaagttttctcttttcctcttttattgtttyagattctgttttccaggtctccttttcactaaaaacaaaacaaaacaaaaagacaatactgtaaacctaataaaatgtttataagaaaagataacttcagattatgcaaatttaaagttttctcaacacaagaggtatcatagctattcagtatctgaaaacacaagaagttaaactttcatttaaaaagggtttagcct

SEQ ID NO: 115 - DNA, 1670 bp, Homo sapiens
  misc_feature (1490)..(1490): Y = C/T
tgtcaccaaaaaaaaaaaaggtgggaaaaatgaggaggcatgtacaaggcaataaagataatcagataatcaatacaaagaaattaaagaaaactattgggctatggttggcaagggcttaggaagatgggtagaaatatagactagagagggaggaaaggtaacaggttccagtctgggtgaacagcaagagcaaagtcacaaaagtagtcaccaggttgtgtgtgtgcacatgcatgcaagcaggtgaatgtgctggttggtgggggcgggggaaaatgatgggtctgttctgattggagatgacagtttaaaggaaggaagaacagaaactagccctaaaaaagttgagtggagtaacttttcagaaagccttgagcactaggtacaggaggacagacaccattttcctcttctgtaaaatgacagggttgaactagagatatattgtctttttcagctcaaaaattatgagcacaagtttatgagatagagttatgaaagacagcaagggaacaatagcatcagaaccatgtaggaagaaggcaaatccagaaaacagactgaggaataaagccatggaacccgaaatggaaaagaagaactgacaaagcttattaatgggctagatttaaggagtcaaaaatcacagaaaaccagcagtgccactgacaaagaagggaactgagcacacatatttccaaatttatgttcaacatctaaagtctgcaatgacaatttaaaatccaggtataaatatcctgcaagtcatctggaaataattagaccacatctatagccttaatgagcggaccagatcagagaagcaaggctaggaatcatgagcttaggaacaataatagaagtcaaggaataactgatctgaaggagagtatgtgaacaaaacagacagacactaggtactttgggatgccagccccatattggtacaggcatttggcagttaaaaaaaatatattctataaaaatataatctgcagccaggcgcagtggctcatgcctgtaatcccagcactttgggaggccgaggagggcagatcacgaggtcaagagatcgagaccatcctgaccaacatgctgaaaccccgtctctactaaaaatacaaaaattagctgggcgtggtggtgtgcacctctagtcccagctactcgggaggctgaggcaggagaatcgcttgaactgggaggcagaggttgcagtgagcagagattgcgccactgcactccagcctggtgacagagtgagactctgtctcaaaaaaaaaaaaaagaaaaaaatatatataaaatgtgcaatctatcgatgataattatcctgactggaacagaattcaactgaggtgttcaatatgacttatcacctactctatttgatatattggtgtttaatacccaccatactgtcgtcattccaaacaccagactgggctgcctgtccttggaatgaatcacttggttgttcatcctgyatgctagtctgattggagctggtggccaaagagggttgctcattattctggagtgaagaatgctctgaatctgtggatgaaggtatattaggcgctggaatgtcatcttgaagaatcaaacatatcaagtccccagaaacaatcccatatgaagccaaggtctcttcatctccagtgagg

SEQ ID NO: 116 - DNA, 801 bp, Homo sapiens
  misc_feature (401)..(401): Y = C/T
ctggcagccatgggcaccattctccacacagaaggcaggggacaggtgcacaaggcgctgagaccccagcagggctaactgtccttgtctcaggagccctacctggccagtcttgggccaggccttggggactgggagtaggggctgagccccgtctgtacagtctctggccccatgggcaccaggtgccagctcctcgcacccagtactcccattgctagggctgctggaacctgcagggtggcagagctgggcaggactcaccctataaccatgtccactgtggtgctgctgctgcagagaagtgtttccaatgctgcgacccgggtgtgtaggacggggaggtcacgatggcgcgacgtctgcagaaatttcatgaggaggtatcagtctagagttayccagggcctcgtggccggagaaactgcccagcagatctgtgaggacctcaggttgtgtataccttctacaggtgagtgcagaggtgacagcagggatacctcctgagggttggagacagcttcccccaggatatatcaaagctgcctccttactcccccatctcccagcttgggaaagtgtggagaattgagcagatggactttagctagaaatgtttgagaaatactgattagagcttgggcttcagacacaggtggtcgtggagtaaaatctggtctccatctctccctggctgtgtgaccttaagcaaataacttgacctctctgagcttcagtttcttcatctgtgaaggggagatagcaatcctgatttttgagattggaatgagaattgaagga

SEQ ID NO: 117 - DNA, 601 bp, Homo sapiens
  misc_feature (301)..(301): R = A/G
ttaaattctttaagacactctttgctgtattcttctgttttacttaacttagactgaatagtactcttttcttcaaccagattcttaagttgcttttcatatgtttcaactttctgtatgagagattgtgtggtaaagataagaggtttcattttggacttaaggtttagattttcactctccagttccattacttttttctgtatctgcacagattcttttaggtaattctgtaagtactgaatttttgcaacacactgctcagtaacggaattaactttggaagttttctcattttcaratattattgatccttgttttactagaaatggttgtctttctttgtctttcatttcatgttttgtttggtcgaggaaggacagtgtgtatcttggaactctggaatggaattttaaatctgtaatatttttgccagtgatgggaatttctttattgtttttctcatttttctttcccctgtgcatttcactcttagataactttttacattttctacaaaaatgcacatggaattttgacacagtttccctgaaggggagtaatttcttcactaatgcctctaattctgaaattctctttg

SEQ ID NO: 118 - DNA, 801 bp, Homo sapiens
  misc_feature (401)..(401): R = A/G
ccactaagaatttatacgaaatttgcatgcacaagccgaccacatttgccagagatgcacttctaaaaacccactgacatcagatacatgtagcccaactttctcaaacaaaaagttgtttcctggggtagttgtgcactctggaaaaacagtcactctgtggcctaaagtaaaggttaattttgcttccccccaccctttctcctttgagacctttgctttgagcagagtaaagagaatagtaattctggtatcaaatgaagactaatgcttggttaaaattatttttctttcctttcattagacaacagaggagacattggacttttattgggaatgatcgtctttgctgttatgttgtcaattctttctttgattgggatatttaacagatcattccraactgggtaggtttttgcagaatttctgttttctgatttagactacatgtatatgtatcaccaaaatttagtcatttcagttgtttactagaaaaatctgttaacatttttattcagataaaggaaaataaaaagaacaatgtttaataagtacttacccatgccaaactctctacaaatgtctttcctttaatcctcaaaatgaccctgccagaaaagcttcctggcctattttacaggtgacttaaatgaggcttaaagaggctaagtcctcagcccagaatcactgaacagtaagccctgagtccaaacacagctgatatcaaagcccatttctctcctttactacacggcgttttccattgtgcctcaaatttacctacagtgcctagattcttga

SEQ ID NO: 119 - DNA, 634 bp, Homo sapiens
  misc_feature (307)..(307): M = A/C
agttccttcacagctgcggcctccccgggtccattaacgaaggtggggaagggcggagaaagggtcggagtctgggaggagagcagctgcgggcgcgccagggcgctgacagtctggctcttggaggtaagatgggcgtggctgatcccgaactccgcctgcgtttgcagaagcgaagggaaccgagcgagcggagctgagctcgggtaggccgcgcgaggtccctcctctccgggcgtccgtgcgcctagctctgcgctgggagcctcgcgccctttgacagcagttagttgctgactcggatgcmgagagtcggtaacaccttctccaacgagagccgggtggcatcccggtgtcccagcgtgggccttgctgaacggaaccgggtggccacaatgccggtgcggctgctcagggacagtccagcggctcaagaggacaatgaccatgccagagacggtttccaaatgaagctggatgcccacggcttcgccccggaggaactgggtgggcaagtggatggccaatggctggtgggggaccgaccgcaacaactggaccttcagggccccgcccaggggtttgttaccccatgtcacaacatgtgcccccgcaaaaagcttcccttccacct

SEQ ID NO: 120 - DNA, 601 bp, Homo sapiens
  misc_feature (301)..(301): R = A/G
tggaagagcctgcagagggcaggcagcagagaaccggcagagggcatgggaagggccaggcagaaataaagggtagctcttgaagcatagatgacagtgtagaccgtggttcttttctcttgctttctccacctttctcttcaatagtttgtttctcctcattgctgttccaatggcaacctctattctgccctatcattgaaatctagaaaaagaaagtagctcaaatgtgaaatatcacctaatcttttcttctatttctccagagaaaaaatccatatacctgaaagatctgatgaarcccagcgtgtttttaaaagttcgaagacatcttcatgcgacaaaagtgatacatgtttttaattaaagagtaaagcccatacaagtattcattttttctaccctttcctttgtaagttcctgggcaacctttttgatttcttccagaaggcaaaaagacattaccatgagtaataagggggctccaggactccctctaagtggaatagcctccctgtaactccagctctgctccgtatgccaagaggagactttaattctcttactgcttcttttcacttcagagcacacttatgggcca

SEQ ID NO: 121 - DNA, 401 bp, Homo sapiens
  misc_feature (201)..(201): R = A/G
gcgcggtgctggctgtgcaccccgacaaggtgagcagagctgccaggcggccgcttgaggccttcaggggcggggcggggggggggtcctgccccgcccgcccccgcatgcttataagaggcgcttacaccgcctgtcacccataggctgcggggcagccgtacgagcagcacgccaagatgatcttcatggagctgaatracgcctggtcggagtttgagaaccagggctcccggcccctcttctgaggccgcagtggtggtggctgcgcacacagctccacaggttgggagccgtcgtgggacctgggtccccaccgtgaggaccccgtgggcgacagcaggtgtggccagggtggggctccgagccccgggtcaccgcccgcccagcgttccaggcac

SEQ ID NO: 122 - DNA, 628 bp, Homo sapiens
  misc_feature (429)..(429): Y = C/T
ctggcaatcagaccctccactcccacctggaagtcacccatgggccctgctgtactgacagccatgtccttgctgcatgtaggcactacacgaatgcacattctgtcccacccctcaccactcagtcaggctttagggctggcttcagtccaagagaagaggcccgcagactcccctgctactccttccacctcacagaggaagtctctcttgacctggaaaggtagaaggccacaattaggatgaagaggttcagggtgaattcacagaggatgggggtagatccaagaatgggctttttcttacaggatcctcagtgaagtgcattcggaatgaggatggaacttggttaacaccaaatgaatttgaagtcgaaggaaaaggaaggaacgcaaagaactggaaacggaatatacgttgtgaaggaaygaccctaggagagctgctgaaggtattataatgacgggacagataggtgacaggtttaaatccttgaaggagaagtggagctttaagagcagaaatgtgaagagctcccgttaggattcaacagcatgatttataaggagttaaatgttcatagaaaaaaaactgtgggtgacaaagttaggagcacatattgttcctg

SEQ ID NO: 123 - DNA, 601 bp, Homo sapiens
  misc_feature (301)..(301): R = A/G
tttcagataccctttaagctgggtgtcccaaatagtttacttcaattagtatttagtatcctgctttaaaagcctatccagtattttcatatctgttttaatatttagctcttatttttcaatataggcctgaagtgttagaagattcacctctggttccccaaaaaggcagttttcagatggttcactgcaattgcagtgttcatgaatgttgtgaatgtcttgtgcctgtgccaacagccaaactcaacgacactctccttatgtgtttgaaaatcacatctggtggagtaattttccrgtcacctctaatgtcagttcagcccataaatatgggtaagttatgcactaaaatgatgataataggtctaaacatcagtcatatataaaggttaaaaattgcttacaaaaatatttgctagcttatctcactttgcttaacactgtaatgatggtagatgtagtactgggggtattaagagtggcttctagaatgatttaacaatggtatgtatatctctgccattgtcacttaaattctgttttgaaaactgttttctttcaatcctggatctatgtaatggatgtgtattgattggat

SEQ ID NO: 124 - DNA, 601 bp, Homo sapiens
  misc_feature (301)..(301): Y = C/T
gggccattgagaagtctgaacagggctgtgtctgaatgtgaggtctagaaggatcctccagagaagccagctctaaagcttttgcaatcatctggtgagagaacccagcaaggatggacaggcagaatggaatagagatgagttggcagctgaagtggacaggatttggtactagcctggttgtggggagcaagcagaggagaatctgggactctggtgtctggcctggggcagacgggggtgtctcaggggctgggagggatgagagtaggatgatacatggtggtgtctggcaggaggygggcaaggatgactatgtgaaggcactgcccgggcaactgaagccttttgagaccctgctgtcccagaaccagggaggcaagaccttcattgtgggagaccaggtgagcatctggccccatgctgttccttcctcgccaccctctgcttccagatggacacaggtgtgagccatttgtttagcaaagcagagcagacctaggggatgggcttaggccctctgcccccaattcctccagcctgctcccgctggctgagtccctggcccccctgccctgcagatctccttcgctgactacaa

SEQ ID NO: 125 - DNA, 801 bp, Homo sapiens
  misc_feature (401)..(401): R = A/G
atgcttggagaatattgcttagtcatgtccatatttccacttccataattttttagtagttttaggttcatagtgggtcaacagcaacacattgacctaatgaccagaaaattgaatcttggaagaatttcttccactaagctctttggctgatctcttttgagaggaggtaaaaatcacaatgctgctgtccgaagaaaccctttgctctgtggaatggtgggaactagatccaagtaaatgtgcagagagcacatggtggtcttcggctttggttcctgggcctttctctactaaccttccactggactctgatttgtttctaatatagaaattttggttataatggtgatgttccttcttagctaacttatcttccccctactttccttcctaaggartactgcttaaatcttccatcagctttcaaaatatcatagaaggaactagaaatttccacaaagacttcctaattggagaaggagagatttttgaggtatacagagtggagattcaaaacctaacatatgctgtcaaattatttaaacaggtatggaaagaattactgtcacaggacatcagttccacttatttgttcatctttcatattaaaatatgtcatttttcatcaacattgaaaggggtatttgaaaataaaattttataagtggaaataagagatatgatttcagatgactggagaagtaaagacctgtcttgcaagaatgaggaagttaaatgctttccatccccagatgttatagcatgaaagacttttctgggctgggtgtggtggttcac

SEQ ID NO: 126 - DNA, 801 bp, Homo sapiens
  misc_feature (401)..(401): M = A/C
attttcaggtgttcagaaactttttttggtatatgactttgattttttacttttcattcatcttaaggtttgcacaagacattctttggtatgtgggaagataatattcgaactatttagtttgcctacaaaaggaaattaacctttagcaatatttaatacatggattgacaacaatatgtgtaaattatctatatgaagacttggtgccaataatctttccctttttttcttttaactgataaggaactatgctctgaatatcatctcaaatatatttttgttgttgaattgttctgttgtaggttacaaaaggtgtgaagaggaaagcagatacaacaactcctgcaacttcagcagttaaagcaagtagtgaattttctccaacattcacagaaaamtcagtggcactgccacctataaaagaaaatatgccaaagaatgttttgccagattctcagcaacaatataatgttgtgaagactgttaaagtaactgaacaattaaggcactgtagtgagattcttaaagaaatgcttgcaaagaaacatttttcatatgcatggcccttttataatcctgttgacgttaatgctttgggactccataactactatgacgttgtcaaaaatccgatggatcttggaactattaaggtaaatgttgccttaaaaggaagaacttctttttcttgattataaaagtaattcatcattgcaaagaaatcttaaaatctagaaaaagatgaaggaaattaagatcatccaagtcacactatctggagtgagtctctggaaaatt

SEQ ID NO: 127 - DNA, 699 bp, Homo sapiens
  misc_feature (589)..(589): R = A/G
tggatgactggactctaccccagacctatcaaatcagaacctctcaggttgggaaacraatcatctataatctatgtattataggtattttcctgtttctttgtctgtattaccttatatttcattgtctatctcttttttattttaattttttaatttttaaaaataactattgggtactacatttcattgtatatctctaaaggataggcatgtaaaaaacataatcatgatacattattgtatctaaaaaacttaactataattccttcctatcatttaatatccagttaattttcaggcataaccacaataccattgttatgcattaaaaaattaaggctaggcacagtggctcacacctgtaatcccaacactttgggaggtcaaggcaggaggatcacctggcaatattagcaactgattgcaataaatttttgcaaacccgatttaacactaatcttgaccttgttctttattaattagaacttgtttcctgtccacgcaatgtgtctgaatgcagccatgactgtgttctgacatcagaaggtcccttatgtttctgtcctgaaggctcagtgcttgagaragatgggaaaacatgtagcggtgagtttatttgctttatttaccttttgtttgtttgaaaacatacatttgctcagtgacatctaaaaattgatcttgttgtcaaggaag

SEQ ID NO: 128 - DNA, 601 bp, Homo sapiens
  misc_feature (301)..(301): W = A/T
ggctccttgggggaactcttctgaaatagctattgatataccctctatttagatacactgcatttctctccctaaaagctatagctccctaaaagcaagctgtagacttgcattaatggcatccttttcatcttcaaacccacttgtgaatttgtttcttttctctactaggagcagatccctgcttatatcaaaacggaggctgtgaacatatttgcaaaaagaggcttggaactgcttggtgttcgtgtcgtgaaggttttatgaaagcctcagatgggaaaacgtgtctggctctggwtggtcatcagctgttggcaggtaatataataaattatgtggcaaattacctaacgttggctcagaaatacagctgtacatcaatctttatgcttttgctgattttgaatattttggatgttaaaagttctcctgtttttaggaatgctaagaatttgtttgtttatttgttctcttctgctgagttttgagttccttattacaggcaaaattcaattgacctctagtggtaacagtcttaagctccaagccctccacctccccatttatagtggagtgggtcccaggcttggaaataaat

SEQ ID NO: 129 - DNA, 601 bp, Homo sapiens
  misc_feature (301)..(301): K = G/T
atcttccagtctcaggctgtttgttcccccgcggggcaatgcgactgcgcgtcgcttcctgattggccgagagttgcgggctgcgtgcgcaggcgcctacctctgttacttagggcgggagcccggcgagggcgccggtgctttgttctgtctgaggccaggaagtttgaccgcgctgccatgccgaaccgtaaggccagccggaatgcttactatttcttcgtgcaggagaagatccccgaactacggcgacgaggcctgcctgtggctcgcgttgctgatgccatcccttactgctcckcagactgggcggtaaggctggagcggagtgagagggctgggcagggcagttgggcaagccggagggtgaggcgggagggcagaaggcctcgaggaggtcaggcggcttggccctgccagaggaagaggaaggcccccgtttgtggccctgggcaaaccgacaccagaaccacctccctgtaatgccccagcatctgcctgcgggccctagagcacgggatcctcacggctgtttctcttctttgctccttcaatccccaaaagcttctgagggaggaagaaaaggagaaatacgcagaaa

SEQ ID NO: 130 - DNA, 601 bp, Homo sapiens
  misc_feature (301)..(301): N = A/C/G/T
ctcctgagggcaggtggagcgggctcctcggagtttggcctcccccggtcctgcttggccctcccgagcagctggtaatcgggctcttcggatggaggccgagtggagttttggagcgcagcttctccatagctgagcggctccgggcttttacagggctctgtgcagttgacccccaaaggctggtccactgtgttcatgtgttggttggaatggaaaaccaaggctgtggtcttgtgcacccgccccgcgccacatggccgggcctcctccatgggtccagcctcgttcttctctttcncatctgttagaaacccattgttttggcttttaaagggatctgcagctgggaggcttttgaggttcccctttttgcggtccagagggaacgtctggtaacacttcttaaggtcgggcgaggtctgcacgcctgtgctcttggtgacgttggggatggacctgcgtgcgggcactgtcatgtatttgcggtaggctgctctgcaggacacgggcttggcctcccgcttctcccccagctggcccgaggacagctgtgtgtccctctgctcattctgtgcctcgcagatatccttaaaccgca

SEQ ID NO: 131 - DNA, 801 bp, Homo sapiens
  misc_feature (401)..(401): Y = C/T
caaaaagttgctgggcgtgagggcaggaagtgttcaggaccacaggacacgcagactggggctggagggagagggctgagctggagacagacccggggaccctttaggaaaggcctggtgccagtgggcatggaggggaggagcctggatcagaggatcagggactgtccagggttaggaggagagagaagctggaaaagaccctgccacaggtgggaggagggaggaggtgtgggaagaggtgcgaggaggcaggaggtgtgggaagaggtgggaggagggaggaggtgcaagaagaggtggaggagggccctgtggttatcaagggtcatccctattgatggcttctgcccttcgtccctccccagaggggcaatcccgtactgaagttcgtgcgcaaygtgccctgggaatttggcgacgtaattcccgactatgtgctgggccagagcacctgtgccctgttcctcaggtgagctctgcggcgccaccccagacttcaggaagggcaccccactggcctgggagggtcatgtcccagtgttctggactgttctatgagaagcctctgggcatggtcctgcaggttctgggccttggtgggaccctgtgttggaggcagggggtcttggcctggaggtgcccagtgcaacaagagctggagcccgaactcctgggtctcaggaaggaggggctgggggccggactcctgggtccgggggaggaggggctgagggctggactcctggggatctgagggaggaggggctggggcctagactcctgggtctgaggcaggag

SEQ ID NO: 132 - DNA, 701 bp, Homo sapiens
  misc_feature (201)..(201): N = A/C/G/T
ttgcagggagaggctcagggaaatgtgctgggagcctagagggttctgagctcggcaggtgaattccccttcatccttcacatgcactcgaggcagctccagcaccccaaggttcgaggactgtgaggggctcagggtcaggctcccccaggtccagctcagcctggcagggggattgctgtcgacagcacagacaaggtncagggactggccctccaggactgaaagggccgagccattcctcaaggttgtggatgctgtagagaaagagacagaagggcagagagagacaaagtgatcgaggcagggaggaaggatacagaaagagagtggtgaatggaacagacactgatacatgctgaattgtagggacatatgcacgttcactgctcactgttggggatgtaaacttgtccatctttaattagaacaatttcactctatctttcaaaatcagaaagacatatgacactgctatattttgcttttaggactttattccatacacttagatattccttgtgggagtagatacaacaatattcattgcagtgtttgtgctgtaggataaaattagtgccatgatcttccattagaagatgccacaaaatcagagactattcagacagtggaatgacacacagccctagaggagggtgcaaacagtctcactactgacatcaaaccacctctgagatctt

SEQ ID NO: 133 - DNA, 640 bp, Homo sapiens
  misc_feature (207)..(207): R = A/G
tgctccaggaactgctcctgaggaggcccctgggcctctgcctccgccgccaaccccatcttctgaggatccaggcttttcttctcctctggggatgccagatcctcatctgtatcaccagatgggccttcttctcaaacacatgcaggatgtgagagtcctcctcggtcacctgctcatggagttgagggaattatctggccaccrgaagcctgggaccacaaaggctactgctgaatagaagtaaacagttcatccatgatctcacttaaccaccccaataaatctgattctttattttctcttcctgtcctgcacatatgcataagtacttttacaagttgtcccagtgttttgttagaataatgtagttaggtgagtgtaaataaatttatataaagtgagaattagagtttagctataattgtgtattctctcttaacacaacagaattctgctgtctagatcaggaatttctatctgttatatcgaccagaatgttgtgatttaaagagaactaatggaagtggattgaatacagcagtctcaactgggggcaattttgccccccagaggacattgggcaatgtttggagacattttggtcattatacttggggggttgggggatggtgggaat

SEQ ID NO: 134 - DNA, 601 bp, Homo sapiens
  misc_feature (301)..(301): Y = C/T
gaattaccagattgtagggtgcagtagggaactggtgggagatgagactagacaggaagagagttaagagccatgtaatgaaaggctttgaatgtcctgctaaggagcttgatctttggcctatagacaaatgtgagcaattaagtaggtaagtgatgtgttcagaatttaattttaccctcattacagagaacatggacctaatttctttgttctttcccattactagaatggtaaatcaccaagtttattatatctaatatataaaaatgttttctcaacagaatgaactaaaattgtyggtggtttctttgaaagaaatacaagagagtttgaaaacaaaaattgtggattctccagagaagttaaagaattataaagaaaaaatgaaagatacggtccagaagcttaaaaatgccagagtgagttttctttttattttaatgcttttgtatctaaaaaaaaaaattagcaaattcttgtttaattatgtgttaatttttggatttctgaattatctatacttctcttcctcttaaacttttttgaccttatttctaatctgtagcttttctctagagtgaatatggggaaaataaat

SEQ ID NO: 135 - DNA, 601 bp, Homo sapiens
  misc_feature (301)..(301): Y = C/T
tcacagagaaaactatttattccggagaggagaacatggacattaccaagagtcatacagttgcaatagataatcaaatttttaaacaagatcaatcaaatgtgcaaatagcagctgcaccaacacccgaaaaagaaatgatgctccaaaatcttatgaccacatcagaagatgggaaaatgaatgtaaattgtaactcagttcctcatgtatctaaggaaagaatacagcagagcctgtcaaatcctttgtctatttcattgactgatagaaagactgaactcttatcaggtgaaaatayggatttgactgaaagtcacacaagtaacttaggaagtcaggttcctcttgcagcttataatctagcaccggagagtaccagtgaatctcactctcagagcaaaagctcttcagatgaatgtgaagaaattaccaaaagtcgtaatgaaccatttcagcgatcagacataatagccaaaaacagcttaaccgacacctggaacaaagacaaagattgggttttgaagattttgccctaccttgataaagattctcctcagtcagctgattgtaatcaggagatagcaacaagccataatat

SEQ ID NO: 136 - DNA, 801 bp, Homo sapiens
  misc_feature (401)..(401): R = A/G
tcaaatagcaattaaaaaaaatcacataagaaaagacactcttaataaaatacaaatagaaaatgaaaaaaaaccaactcataaacttggtttaaataatccatttgtattgggtcttagtaagaatactactactagtaactattatcaagcaactactgtgtcatgtacttttcacacattcttttaattaaaaactctccactaacccttacagttcagtattatccttgttttacagatgaagaaaagccaaagagaagttatataactggcaagtttctctggctccccgcctgcaccactgctcaccagattgcatgaagagggaggcagctgtaacacctcatcccgttgatctccagggaactcagatacttgtttccacgtccaggaaaccrcaaactaagctctttgaagcatcagcaaaccttgctaagtgacacgtgaatgccatttggatacatattctaatctttcaagtagaaaggacagtcagactgcctcatctgtaacatccaagggatctgagaacagacattcagtccaggtgttgaacatcaacatcattataggaaaatggtcaaagagaacaatggcacacgttaagagaacatattaatagggcaagatgtatagtaaactaagttttcaagaagtattttatcatttttatgctctctactaaaagctgaccactgtagagtggatacacattgctacatacagcaactctacagtggacagcttttagtagtaagcataaaaatggctttatgttctcatgttctctgtgtagcc

SEQ ID NO: 137 - DNA, 601 bp, Homo sapiens
  misc_feature (301)..(301): W = A/T
ttcacccaagccagcccttttcttgtcaccagccaagaaaggccagaaggaacaaatcagttgccctcttttcaagtttgcatggagaaaagatagcaaccactttcttcccaagcccagttttcttttccctggttccttataagtagaggttgattcgatagtccaactaaagagcaaaagctaggggaaaaactcaccctattccctacctcaagttggaaataaaatgttcatcttcagatgacatgtgtgacaacagaggtgagtatatgttgagtaaggaaagatcctcaggacwcctgaagaagttacttccaaaccaattcatagtgagaagtgttttcttgtcctttgggctatcctttttccctttggcaataagctggtttctaaacttcggattagtccaaagtgaaacatctcttgaaagaatgttcccttaatattctggaacctgaggtcatagcagtgtaactaacagacatcttttttctttaaaaacaggtatacacctaactgtggacacattcatcttactaatctgtagggagatattgctggagtatagagtaaatagaagaaaaagacttatctttgg

SEQ ID NO: 138 - DNA, 801 bp, Homo sapiens
  misc_feature (401)..(401): W = A/T
atggaggaaattcttcccatacttattagaaatatgagttttgagcctacaagaaattctttgggattctgaagctgaggaagcaccgatagacttgtccaattggttactaattttccctttagtctgaaacatgtggagttcaggcagatgcgaatgaaagcttaatccaagctgatctttaataggcttgtttccagcatgcctgtgatcacttcggtctgtactaccagtcaactttttgatttttgtcatgggtgcttcatggccatttctttcaacttcttgccactgaaactcaaagtgatgaatatctttcttcatttctgggaagcaaaaatctccaatgtgatgacttttatgtctttgcaacgtccctgtgtggatcacttctcctgtawtactgtgcctggttgatgagaactccatcatggattttaaagagctatctaaaaaatataaagaccaataggtttccaattaagtacagatggtaaataatagttgatattcagatgtgtaaaaattacacaaaaagcaatacttattttaaacttcccaaatgtgatcttcatagtttaagaacacactgtctctactgaacatacaaaaattagccagtcatggtggtgggtgcctgtaatcccagctactcaggaggctgaggcagcagaattgcttgaagccaggaggcagaggttgcagcatgcggagatcaccacattgcactccagcctgggcaacaagagcaaaattctgtgtagaaaaaaaaaagagttcagtcaagagcctcatatatat

SEQ ID NO: 139 - DNA, 559 bp, Homo sapiens
  misc_feature (301)..(301): R = A/G
ccacattcatcacatttataatgttttcctcgattattaggagacttctcaacttgattgtattcataaattttcccttcacgttgaaattgctgcagttcagggagatgtgactgaaagcttactccaagctgattttcaatatgcctgtttcctgcagcccttctatcacgttgagctcttctaccagggagattttctttttgcaacataagtactgttttataatttccttcatcatctttccactgacactcaaagtcgtatgtatttttctgaacttcctggaaggacaagcctrcagtgtcacagctttcaagtctctccaacttcaccgtgtagaacgcttctcccatattgttcttcccctttggtggcaaatccgtgtttacacatttacaagagatatctgtaagatataaacaaccatagatttccagttaactatagtaggtaaataattatttcccattgaaaaacctaatgttacaccaaaagtaatagttatgttgaacagacttacgattcttcagaaccataattttccagaacacaaaag

SEQ ID NO: 140 - DNA, 501 bp, Homo sapiens
  misc_feature (251)..(251): N = A/C/G/T
gaagctgtctaccatcggtagctggtatccaaaggatgtctcaagaatctttctcctgtttgcatttagaagaccaaaaatgaaagtaaacacttgattaaagtcagagtattgttctctcttctctttatactctctgctgcctgaggggatcagatagttgggtactgccatcagaaatgcaatggctgtacaaaactcctggacgttcaagtgtatgaacttgtaacggtctttatgagtgttgctcngcaaaagaatattcgcggcctgcaacacagagacatcagcctcagtaaacccaacacatctgaggtcttcaccactgaaattcagggtgctcagaaacagtcctcctgcagccagcaaacacagacgttttaggagacctaggtgatactgattggcagtaagtccagcctctgatgtcaacgcatcagcaagaaagtgggcatgtagatcagtgggtgtttggcagcagagctggaagtcacgcccctt

SEQ ID NO: 141 - DNA, 601 bp, Homo sapiens
  misc_feature (301)..(301): R = A/G
taaccaaaatagtgtccagacactgccagctgtcccttgtgggggcaaaatctctcaagttgagaactactgagctgtgtcattgggctgtgaaatcagagaatgagttcatgatggatgatgagagacaaacacaggtgtgcaggctgtgctcccattagatgaaactcatccaaaattttctttgtttttgcagaataaataacgtttccttttctggccagagtgttctgctctttgaggtgctcttttatcagccagacttgaaatacctgagcttcaccctcacgaaactctctcrtgatgacatcaggtccctctgtgatgccttgaactacccagcaggcaacgtcaaagagctagcgtaagtctccgtttattgagaccactgattgggtttcagagaagactatagcctaagtctccgtttattgagaccactgattaggtttcagagaaaactatagcataagtctccgtttattgagaccactgattgggtttcagagaagactatagcgtaagtctccgtttattgagaccactgattgggtttcagagaagactatagcgtaagtctccgtttattgagaccactgat

SEQ ID NO: 142 - DNA, 801 bp, Homo sapiens
  misc_feature (401)..(401): S = C/G
tgggctgagagtgggaaggtgctggtggtgcccactgatggcagccactggctcagcatgcgggaggccttgcgggacctccatgcgagaggccaccaggtggtggtcctcaccctggaggtgaatatgtacatcaaagaagagaactttttcaccctgacaacgtatgccatttcatggacccaggacgaatttgatcgccttttgctgggtcacactcaatcgttctttgaaacagaacatcttctgatgaaattttctagaagaatggcaattatgaacaatatgtctttgatcatacataggtcttgtgtggagctactgcataatgaggccctgatcaggcacctgcatgctacttcctttgatgtggttctaacagacccctttcacctctgcgsggcggtgctggctaagtacctgtcgattcctgctgtgtttttcttgaggaacattccatgtgatttagactttaagggcacacagtgtccaaacccttcctcctatattcctagattactaacgaccaattcagaccacatgacattcctgcaaagggtcaagaacatgctctaccctctggccctgtcctacctttgccatgctgtttctgctccttatgcaagccttgcctctgagctttttcagagagaggtgtcagtggtggatcttgtcagccatgcatctgtgtggctgttccgaggggactttgtgatggattaccccaggccgatcatgcccaacatggtcttcattgggggcatcaactgtgccaacgggaagccactatctcaggtctgt

SEQ ID NO: 143 - DNA, 801 bp, Homo sapiens
  misc_feature (401)..(401): S = C/G
atggagtaagactttattatgtgtgacaactagaaactttcatagtttatgcatatttctatatcaggtagatcattaaatttaaccataagagtagatgttcaaaagaaggcattctatttatctcaacttcccattaattatatcactctccatcatttttatgatatgattttgtgttattgatatttattaaggcatattagtattctgtagaagactgagtatatttattgtactaaagcaaacagatttcacttaactgatgatcacagcacttgaactcaatcttatttaataagaccaagaagtcctggcatttgttttagctttgctttcattggttatacataaaattatgacttacttttaaaatgtgttcttcagctttggcttgcttsgtggcccctccaacaccaggtgaagctgttagtcccagtatctgaggaaggggaatcactggtttgttttctttcttgagtctattgtttttcaacttctgcatcaaataatgcctcatgatgttattatacactgcttctttgttggtgtgatgacattcatcaatgataatgagggaaaagtcttaaaagaaaattcaaagagttcatttctccatatcagcacactacagtgagaaaatagctttagaccagtaattgagctgccttggggatgccttctcttgggcacgacacaagagcagtccactttcagtttttaggagggaaatctaactatactagcacctgtacacacagacgttcgtatatactaatcatgaaactccctgttagacat

SEQ ID NO: 144 - DNA, 601 bp, Homo sapiens
  misc_feature (301)..(301): Y = C/T
gacggttccagctgttaggagaaagtgaaggtgggtgccatggatctgatgatttcagtgattttctactcaagaaaaatgaagtctcggatgggcagagcttaactgccttaaaaacttggtacagggcaaggtgtgagtttcccggtgagactgtgtgaactgtgaacgggtagagtctgaaactacaaaccagatgtttcctggctccctcccgcctggtctggcctgtcttccttcagctgctatgcagttcatcctgggtccctgagggcctcgcagatgcttcactcgaaagatyggagttgcagagtcccctgtggaggaattgaactgccccctctcgcaggaccccagctggcaagggtttgttcctccctggagggtagagaccctcactgaggccctggagaggggcactcaggggcagcagctcattcccaaagttctctggtggagctggggagtggcaccctgggaactctggggtttccccaccagctcctctctccagtctttggtgtccaggtacagtctccaggccgtggcttctcgagttctgtatgtgggttgctgctccgtaatgcatagttgggggacc

SEQ ID NO: 145 - DNA, 801 bp, Homo sapiens
  misc_feature (401)..(401): R = A/G
taaactaagttttcaagaagtattttatcatttttatgctctctactaaaagctgaccactgtagagtggatacacattgctacatacagcaactctacagtggacagcttttagtagtaagcataaaaatggctttatgttctcatgttctctgtgtagccataccacacgttgctacaccaggaacatgagtacatataaccattacatatacatacctgtatgtatgtatattagttacatatacatatgtacagtatatacatgtatatatattgaacccttggaagggatcagcaaagaggaggactcaataaaaaaagactagaatagaactagaagagagagaagcccagggagagcttcaagaagagtgctcaacagggccaaatgcgcagargtcaaatagaaggttaagaagtgcccagtggatttggcaaccagagtcactggtaaccttcaaaagaacaatttcagtagattgttaagggcaaaagccagtttacagtaggttaaggagacaaagggagataaaaattcccaacattccattcattcatctatcccagtgtgtacagagtgattactgtgtgtttgttggcagttgactctaaaaagaaggctagaaatgaggctttttaatttttcccaagtactatgagctctgttggcctacaaaatactcagtgctgtgattcactcatttgtgctttgcatatataatatagtacaaactgctaaagatatttttaaaaaatatattttcacaggggtacaagcgatccatgattatacccact

SEQ ID NO: 146 - DNA, 801 bp, Homo sapiens
  misc_feature (401)..(401): W = A/T
cttttttgtgtgaaacaaatgggtagaaaataacacgtaagtggtgcctttgcattatgaaatgtacttaaaaagcactagctccttttcttctctgatgctatgccagttctttactatttagcatatgccacctatttttatcctgagttttagaagtggctttttctgaaacattaccctgttgtggttgaattagcagatttttttttaatgagtagggtgtgcttctagtgctatcaaaatcctttttattgaatgtaacagtaaagtgtcactagagcagcatatgtttcatagttattcagtgatacatatttttagatgcttagatatttattttcaatgttctttattttttcagaatcagattcattgattcaagagcttgagacatctawtaaggtaatgctttaagttttattttgtcttgataaggtatttaattaacaaaggggtatgaatgatgactagatttgtttattttaaaaaataattaaacagtaatatagtctcttggtatgcatgggggattggttttattctgttattttttctgttcttctttggcttgagtcttcttatttcaacttgtatttatcctttcaaaaagctgaatattttaaaatatgatcagatataaataattcaagatcttggtatctaatatccagtatttaaagaacaaaaatgtacttagaagacattacacctactgtttatacaattcctatcttttcttgtattttttctacttatgaaaatagtagacactagttgtaccaattaccttaagctata

SEQ ID NO: 147 - DNA, 801 bp, Homo sapiens
  misc_feature (401)..(401): S = C/G
tcctggtctgtcttcatctcccaggtatggaggccgtgatgcccttgggcaggagggactggaggtcccccaggaaacaggaattaaggaaaggggtaaaggcaggagggtacacatttaggtccctgagggaaaaggaagaataggcataggggaagcaaagggaactggggactcggggactggagaccactggttgctttatcttccctttccctcaggcctctttgcccggagcatcggtgttgtggaggagaaagtttcccaaaacttggggaccaacttgcctcagctcggacaaccttcctccactggcccctctaactctgaacatccgcagcccgctctggaccctaggtctaatgacttggcaagggttcctctgaagctcagcgtgcctscatcagatggcttcccacctgcaggaggttctgcagtgcagaggtggcctccatcgtgggggctgcctgccatggattcctggccccctgaggatccttggcagatgatggctgctgcggctgaggaccgcctgggggaagcgctgcctgaagaactctcttacctctccagtgctgcggccctcgctccgggcagtggccctttgcctggggagtcttctcccgatgccacaggcctctcacccaaggcttcactcctccaccaggactcggagtccagacgactgccccgttctaattcactgggagccgggggaaaaatcctttcccaacgccctccctggtctctcatccacagggttctgcctgatcacccctggggtaccctgaatcccagtgt

SEQ ID NO: 148 - DNA, 503 bp, Homo sapiens
  misc_feature (251)..(251): M = A/C
cgctaatagccttatattctttccctggagtgaaagaaaactctatattttactatacttacccatttcaattttacaagcaagaatgctgtgctggtgaaaataaactgcttcttcaataactttaaaggtttgaatatcccagaagccgtcagtacttaaaccagccaaaaacttctcattttttatagttggtcttcctgctctccaatgtgtatatgacagtggggtcttatcaaaccacataagagamttatctagagaagaaacattttttcctatgcttagagattaaatcaagacttgaattacacttatacagttaagatttcaaacttgactaattttctcttttcccaaccttctaaaaggttgtatgattatgtataaccctttaagatattttctgattataacagtaaatcatgctcatttttaatttgaatataaatacaaactataaatattgacctataattccaccatccttcagtaataacatt

SEQ ID NO: 149 - DNA, 877 bp, Homo sapiens
  misc_feature (377)..(377): M = A/C
cgtaaactgaacgtgttcttttgtgctcttttataacttgcattacatgttgtaagcatggtccgttctatacctttttctggtcataatgaacactcattttgttagcgagggtggtaaagtgaacaaaaaggggaagtatcaaactactgccatttcagtgagaaaatcctaggtgctactttataataagacatttgttaggccattcttgcattgatataaagaaatacctgagactgggtgatttatatgaaaagaggtttaattggctcacagttctgcaggctgtatgggaagcatggcggcatctgcttctggggacacctcaggagctttactcatggcagaaggcaaagcaaaggcaggcacttcamacagtaaaagcaggagcgagagagaggtgccacactgaaacagccagatctcatgagaagtcactcactattgcaaggacagcatcaaagagatggtgctaaaccattcatgatgaactcacccccatgatccaatcacctcccaccaggctccacctcgaatactggggattaccattcagcatgagatttgggcaggaacacagacccaaaccataccacacacattatcattgttaaactttgtaaagtatttaaggtacatggaacacacgggaagtctggtagctcagcccatttctttattgcatctgttattcaccatgtaattcaggtaccacgtattccagggagcctttcttggccctcagtttgcagtatacacactttccaagtactcttgtagcatcctgtttgtatcatagcactggtcacattgccttacctaaatctgtttgacagtctgctcaacacgactgcaagctccatgagggcaggga

SEQ ID NO: 150 - DNA, 601 bp, Homo sapiens
  misc_feature (301)..(301): Y = C/T
tgaaagcataattggagctgttgagagagatggtcagtgagaagggacactctccatggcagtaatttgccatgaaccccttgggggcaatgatccacttgtgccaacccaggtcccggaagttaatgaatagctggtgacggtggcagaggttcttacaagaaagcttggggacagggatggctgctctccttttccgagaagggtggcactgatcagggttgagagtcaccaccagcagggaagcatgaagggagcatcttagtctggcacaggtgtcttcaggctgaaaattcacccytgagtctctatcttctttgaccagtatctccaggaataacccgaaatttttccgggggttgtcattccaatccttagctacatccagcaggttgaagtgaacagcaccttgtggccatgggactgaccgcaacacaaacattttacctggcttaggggtggtctggccccacacatgaggctcctgaaccaggaacagagccagttccagctctggtcccaggttatagtaagaattgggccccaagtccaggcccagctgggccaatgtcaactgttccctttctttgatggcagacag

SEQ ID NO: 151 - DNA, 801 bp, Homo sapiens
  misc_feature (401)..(401): Y = C/T
aatgatatacacatttgatgttgaatcctcctgtatgtagctctctctagggagatcatgttccacgatctcagccagactttaggtcctgtgagtccaggcactggactcaacatgctcaatagggctttgatgaatgatgatgatgtcaatgcagacatccccataccccagcttcagcacccccttcacctccccacacggaagcagaggggtcctcttttccttctcctggctatgtttatgccctcaactatccttccagcactggagacaagtctcacctgcactaacctgtctttgaaggtcctgggggctggaggggtcacaggccctgagccagcaggctgaggtgatcgttcggcagctgcaagagctgcggcggctggaggaggaggtcyggctcctgcgggagacctcgctgcagcagaagatgaggctagaggcccaggccatggagctagaggctctggcacgggcggagaaggccggccgagctgaggctgagggcctgcgtgctgctttggctggggctgaggttgtccggaagaacttggaagaggggagccagcgggagctggaagaggttcagaggctgcaccaagagcaggtgaatgcaggggtagaaaggattcaaattcataacggagagctgggcagtagcttccaagcaaagaacaggtattgcagaaaagaccctccatgagtagtgagtagtagagtgatgagacctttggtgaaaataaacacacatggcctagaaagatggagaatttgggtacttttatcttaattcaggtt

SEQ ID NO: 152 - DNA, 601 bp, Homo sapiens
  misc_feature (301)..(301): M = A/C
gtcccatgaaagaaataggcatgtaaaggacaaggtggtgcagactaactgcaagaactgggctgttactaaaacaggtgccaagaaccatggttccagcgtcccaggccataagattcccagtgacagggacctggtttcccaaggagcctcacagctcacatcattggagataaacttttcaaccagcattaagaatgcctgccaaaaatatcaagcccaaagtatgtttttgtgtgacccacgtgaacatttggtgattaaacagaaagatgggactgtagaaatgcgggggaaagamaagaagcagcagcccaggaaggcccacagggcccacagaggcaggctcatagccagcaagcaaaaacaaatcccaatccagacctgtaaattcaattccaaatatcagagtcctcagcctgcaatttctgtccctcaaagccccttcctggggcagcaggaaccccgtgctcagcctctgcatctgcagtgtcccaggagccccagaaaaccagtctgccctattctgggaggaacagtcatgcccaataagacagtaagggcagtgcagggaagactcttgcagctcagcaggtgctct

SEQ ID NO: 153 - DNA, 601 bp, Homo sapiens
  misc_feature (301)..(301): R = A/G
aaaccgcctccttcaggctcaccttgacatatgagcaggatgcagtagaaaatcatgaagcagcgaatgttattgcaacactcacagcaggtgctgactaagcagcccaaaccacagggctgctccaaactgtcatccacttctcccggcttcttggaaactgaggacttggcttttttcctttttcggaaaccgccgaaccttatcaaggcctctggaagtagtctcagataccggtgttttttcccgggcttcgaggacttcggggttcccttggccctcctgtccttagcaggctggrcccgcgcggcctccagcggctctactccccttgagacttcatcctggctcccagagtgccgggcgacgcctacgaacatggctcaccctgggcggctcctggcgacgcggcccgagtgctctcggctgcccgtcctgcctgggccaacccaaaggccagcctggcgagggcgtcggaggactcggtggccacaaggggctcttgccgcccaagcctccagagcgaacgtttctcctagggcaggaggcaaacgtcctcccgggggttgacggttgagaacttccaaagctgttttccttc

SEQ ID NO: 154 - DNA, 578 bp, Homo sapiens
  misc_feature (201)..(201): Y = C/T
gagagagcatcttgaacactcctggcaaggggctcctggtgagcggggatgttggcagaaatggtcatatccattaatagaaactcgacagaggtagcacatctgggcaccacagcggcaagacatgcggttgcagccttcagatttgatgaggccagtcccacacttgtggcattttctaatgcgggcagcagtcatttyttcttcactgaaataagaaaacataatttggagctgggagggaagatgaggaggaaaaaaatatggccattaagcatttatttattttcacataaaatgatcacttatggcttttttgtgacattaaacagtgaaaagagcctaggttttggagtctgagaactgcttcaaagttttaattgtatgaccttcagtaaattactcacctgcctggagactcagtttcctcatttttaaactgtgaaaacacaactttctcatggtgttttgagaattacagacaaaatataaagtaccctggcatagtgcccagtactcagcatttagaaaaggactgctctatttgttataggaatccctgtaggcttaaaatggag

SEQ ID NO: 155 - DNA, 501 bp, Homo sapiens
  misc_feature (251)..(251): V = A/C/G
tctgtctgtgggaatagggtgggagggggcagggcagagagtgccctgtgcccccgccctcagccagcacctacctgagcagatgcctttcaggtaaggaaggactttcttccacagtaaagacttgcaaacaaacacagccacaatcaagactacggctgcaactgtgactcctatgatgatgcctgagagagaacagggagaggcaggagtccctgggctggaggtcaccgtctcctccacagctgggvcttccccactgtgctttgtacctgattctttgtggacacattcgatgtcactccagggtgtacaatcaccgaccttgaccatccctctgggacacctgggtacacacacggagggagaggggggactcttgatggaaagctggccaggtgggatgaaagaggagccaccctccctccccagtgtccctgagaaggtgtcaggggaaggatagtctcctcgtgtcagcagtgggtccccctgtgctccctt

SEQ ID NO: 156 - DNA, 601 bp, Homo sapiens
  misc_feature (301)..(301): Y = C/T
caatgtctgagtcagatgaggcagattctagtattttcatcagactctaaacatgccagaattatggggtctgaattttacttttttcttgctttcctagggagcagctatgcattgggaagcaatgcagaagacaaaccaattaaaaaacaacttggagtatcctttcacttacatctgtctgaactggagctatttccagatgaaagggtaataaatggatgtaatcaagttgaaaactttatcaaccacagttcctctgtttcctgtcttcaagaaatgtcttccagtgtcaaaaccyccatttttaataggaatgattttgatgattcttcatttctcccacaagaacagaaagtacaccttagagaaaaaccttatgaatgtaatgagcatagcaaagtctttagagtatcttccagccttactaaacatcaagtaatccatactgtagagaaaccttacaaatgtaattcatgcggcaaggtctttagtcgcaattcgcaccttgcagaacattgtagaattcatactggagagaaaccttacaaatgtaatgtctgtggcaaggtttttagttacaattcaaactttgcacgac

SEQ ID NO: 157 - DNA, 601 bp, Homo sapiens
  misc_feature (301)..(301): R = A/G
ctaggggtttcctcagagtccactaagaaggtaagtgacatagggagtggcagagcctccaggaacattccctacttcaaccagaatagttgtgcttttaagttctagtacaatgttgtttgggctaagtaaaaagttttaaaaccataggcctagactttaaggtccctttcaaccttgagtttatgattataatacagaatttacacaaatgttaatgggagctatgaaaaatcttcagaattgagtcaaacatttgttattattgttctttataactcttgaaatacacttacacttrtataatgctcctgttcatcttctacatctttgtccctcaggattttttgaaatggtgtttttatttgttttggtgatagtatagttgagtcaatattttccattcgttctctctcagtggtcacttttactttgaagatgtgaaaaggtgttgagacttctcccacatttaaatacataggttccccttcaaatataactccttcacaatcaccatccttaaaaccgggaggctggtaatctgggggtgtaactgcaaaaaagtaagtgtaaactgtgctgttcatgaaattaaagaaaa

SEQ ID NO: 158 - DNA, 801 bp, Homo sapiens
  misc_feature (401)..(401): Y = C/T
ttttatggtttttttttcaaaaatagaaactcatattctttccttcttaatttagtttctttcaggacattctcatgagactggtgaaatataactgcgaagtagcatgataactgtgaaatagcatgatcattgtgaaagctatatgacccaaaacttccataggaataagtgcaatgcttgcatatctgaaacctgctgttacatctctttgcacttaataaatatgtgttgactgattcattctcctgggtggtgctgagaaagtaaaaatcatggctgataaaaattctgtttatggttttgtctaacttatttttcagttgagatataggctactcttcccaactcagtcttgaagagtatcaccaactgcctcatgtgtggtgaccttcactgtygtatgccagtgactcatctggagtaatctcaacaacgagttaccaatacttgctcttgattgataaacagaatggggttttggatcttagcaattctcacaattctcatgtattccacagcagcaaagtttagtaagtattgccttctaagtataatttaaatttttataaattaaataatttcaagaacatttaccttgttttaagcagtttgcttccagttgttccagttgaattgtaaactgaaaaatatattgcttttgtacaatcatttttcattacaaatctatcagaagaaattctttgtaatgaatatatcatcagtttggctttgcatattcaaatgcagcagaatttaatgtggtgcctgcacatgggaagtgttgtggatgtttattga

SEQ ID NO: 159 - DNA, 801 bp, Homo sapiens
  misc_feature (401)..(401): R = A/G
ttttatctttcaaggtcctaggaatacaggagaacgtggatcttgttggaatagttccccagcctggctgaggaaggccatccatctgaccacaaggactggcatctgtgctggcctttagttgaattgacactttcagcaggacctgtctgtgtctcagtatatgtgcatttacctatgccttcactacacctttaagaattcatttcaggggcccacacatgtgacagtaattgactttagcactatgaaatactttatgataataccataaaacaaattaatattatattttgctaaggtattccatgcagaaagaattgtaagaaagaggaactgggaagaagctgaacgattctgccaagcccttggagcacacctttctagcttcagccatgtgratgaaataaaggaatttcttcactttttaacggaccagttcaggtaatactttaagaatgagaatttctatgctgaatttgatgtcctctagatattcaaaattgacatgttcttaccctcactctctgttggaaaaaaaatggacatgttttattatctaaaaggtcatttggtgcttagcagtcatggaacattaagcactcttaatgtgcagacactatgaggaatctaaaaatgaatgagatgtattccctaccctttgtttaataaagtccaacagcaatgtatggcagaaaatctagaatataggcaaggaagggccttgggaattcagaggagggagggagtgtttctgggagtataatcaggaaaaatgtcataaagaaggctgattcttgg

SEQ ID NO: 160 - DNA, 801 bp, Homo sapiens
  misc_feature (401)..(401): R = A/G
ctgtaagggttgatattaaacagaaagaggcactgataggaatgtggtctggtgatgcttattttacagcggtggagtattgaaaaactccaaaaatttgtctccaatattgctttgccctgaaaaaactgtcatacgtaaaggggctattacatctacgtctgtagatcgacttgtgctaaggagaccccaatcctttgtagattgataagctatgattgtgaaatctttcccttaaataagcttttataaaatttaaaataacttggaaaacacatttttagaatgaagtgacttactcaaggccattgatgatgttgaaagtattgcaaacaaagattaaaaaccactcgacaacatttatgtacaccatagtataccatcacaaagcctctcattaractttgaatccaatgagtattactaaagattaagctcttttttaatttgcagaaactctgacaccaaactagaaaaaaaaaaaaaaagctggttttgctctccaaatagttgtattgccattcaaaaaaagtaagttaagttagcattcagattgctttatctttggaaaattaagtcacaaaaaaagaataaagaacagatgtggctttgaattagtaatgtaatttccccctgaaatttcttaaatcttgatagtgtgttcagaaaacctctttgcgtcatagttcagaatgtataagataagatggagcaggaggaagtaaagggaggagggagaagtgcaagaaacccaaccagaagggcaccgctgttcccacttcgacttctttcacgtagtat

SEQ ID NO: 161 - DNA, 601 bp, Homo sapiens
  misc_feature (301)..(301): M = A/C
tttgggttaagcagtgttctttttagcaaacagccctgggaggaagaacatatggtcactaacatcttaatattgagtttattagataaagacaagaaaaaatggggcttggggaaattggggcttctggggttttaaggagcatgctgaaagaacgtaagaaacaaaacatgaagggaaatggaaatgttaccctcactcccctcctccctgctgtccagtgtggatgccacctccagcctgcaggacggagccccctcccatcatcacacagtgcacctgggctctgcagccccttgcmtccattgcagccgcagcaagaggcctccacttgtccgtcagggacgctccaaggaaggaaaaagccgcccccggacaggggagaccactgtgttctctgtgggcaggtggggcaggtgctccagggaaaggggggctgaggtagggggcccagtgatcaggcacctgatcccaaaagtgggccttggctctttcctcctggactgggagctccggcagaagtcaggctacacaatgtgccccacaatctgagaaggcctcccctaccttaggccagagggaagtagccaccaaactcagg

SEQ ID NO: 162 - DNA, 606 bp, Homo sapiens
  misc_feature (324)..(324): R = A/G
ctttgtgaattgtgtcaatacccctgttttatcacatgttacaggaacttcaaaatgagggtccttcaccacagtaatattcaaagttgtgggtgaggcatagtttttgccatctgaggctgtaatcttcagggaataactggtgggttgaccagcagtaagattgataaaagggcgtttgagggatatcactccggagaaatgatttagatcaaaatactctagttcattgcctgatacaatctcgtattttaggttctgaagctcatccacatctatggctgacatagtcattatcgatttccctactggccagtcttggcrgatagaccctgtacagttgacttcttcaaacataggctggttgtcattcaagttcctgagctgaagaaaaatggacacttccttctcccggcgaaaaggggatccccagtctgatgctcttacccggaaggtataaattcttttcatgagttcatagtccatgggtttggaggtggagatgatccccaggtaggggtcaatagaaaatggcaaagcttttggtccagcaatggaataggtgacatatccattttccccatgatcccggtcagtggcagtcac

SEQ ID NO: 163 - DNA, 701 bp, Homo sapiens
  misc_feature (201)..(201): Y = C/T
gaaatgcactactaggccaacaaaatagaaaacattcataagtttttattttattaatgtagttgaactacataccgtccatttgttttcatccttttcctggcggtaagctacatcgtgcattaaaacttttacatacttcttttgcaagtgtgatgtattaaatgtcaccacaaagtcattggctccttcccgatagaygacactcaggtcaaaaggagcctcaggtttaactggaaaagaaaaagaaataaattctgtctaaagggcagccaaggaaataattatagtatttaaaattcatctcctctgcaagtcactttgaccctttttgtgtcagtaaatggccaactattcagaaaaccatttcttcttcttgggtttaaatccagtccgcattctccagcctctcttgcagtggggtgtggccttgtgagtgaggtgggcagaagaaatgcacatccacttccaccctgggccagacacacacccatgtgtgactcctctgctccgtcctcttccaccacttggagtcctgcattacagacggtggagccacaagatggaaagtgcccctaatactgctgggagaagccccagctgcaggttagaaacatccattttgactctgatgtgagtgagaaataaacctacggtgtttgagatatcatatgtttgggggcttatttgttacagcagct

SEQ ID NO: 164 - DNA, 605 bp, Homo sapiens
  misc_feature (237)..(237): R = A/G
gagtctcagggtctgaaagctgaaccgtgagaggagatttgtatgagtgtttttggtgaaggacaaggagtttcaggaggcctttgggaattccttagatgttaacatttgttaattaggccacatattctttcttttgtggctattaaaaagagcatatgaaaagagagacagaggatgtctaagcaaccattaaaaccaccatccctcaccatatttcaaattccagattggtgrtgttgacatctgggtcctcaaaagcacaggtcagtgagtgctgcgatccattcacttccaactggctatagcatgagaatgagtagtcatccagttctgcatcttccaagtctcctggggaggaacaaacatgcagctgttaatgaaacaaataaatgcatccttttgaaatatggcatgaccttaataaaatagcagactctgtggcagacatgaaatagtaatggattatgtagtattcaaggaagaaaagcccaagggcaaagacaagaaaaatgcttcaaaaccaaccaaccaacaaaaaacaaaaaacaaaaacgctcaatgctaacagagttttccaatagaaaaaaaaaatccatcataat

SEQ ID NO: 165 - DNA, 681 bp, Homo sapiens
  misc_feature (64)..(64): R = A/G
caggagacattatgggcacagccctgcagaacctggatggtctggtgcagatgcccagtggctrtggcgagcagaacatggtcttgtttgctcccatcatctatgtcttgcagtacctggagaaggcagggctgctgacggaggagatcaggtctcgggcagtgggtttcctggaaataggtaagttggttcagtctttctttcttgaacactctcctccactaggccctatgacagattgatgatacagggaattccagcccctcaagtgtcccatatccttgaacggcatgggggtgttttctgaagttgtcgctgtgatctaaaaccacatttggcttcccagggtaccagaaggagctgatgtacaaacacagcaatggctcatacagtgcctttggggagcgagatggaaatggaaacacatggtaatatcacccaattcccaatgagttctgtactccagagcataattcctgagccctctggaactattccactacctctccccttaacccctttccttcttgcactcagtcttctacctctttaatactgtttatttcaccctcatggatggtcaagtccctcgatcttcctgagcttgtgcctcccctgttcttgtcctcattggtgcccattaatgcctctcttttctaggcctgctatggcatatgttcc

SEQ ID NO: 166 - DNA, 1114 bp, Homo sapiens
  misc_feature (201)..(201): R = A/G
ggcagcatcttaacatctaactacttaggacacccaccctgtttacaggcagaaataaaggatttttaaaacaaagcaaatctgtgaaagaaccaactgaattaaatcgagaagtctaggcagagaggagagagagaaggggtccgtgtacctcatacgctgtgcaccagaatggaccctgcagaacctacctgctaccgrggaaggtggttctgttggtaaccggctgggggtcacagaggttcctgggaaatcagaaaatgagataaatctgtgctctgtcgctgtgggtcctgaacaaataacgaaacatctccgtgactgagtttcctcaccggaaaaatgagcctaaagtagcttacatcactggactgttgtggatgttaataagcatttgagctgggtgcagtgcctcatgcctgtaatcccagcactttgggaggctgaggagggcagatcacttgaggtcaggagttcaagcccagcctggccagtatggtgaaaccccgtctccactaaaaatacaaaaattagccaggcgtggtggtgtgcacctgtaatcccagctgctcgggaggctgaggcaggagaatcacttgaacctaggaggcagaggttgcagtgatctgagatcgcaccactgcactccagcctgggtgacgcagtaagactccatctgaaaaaaaaaggcttagccaggcgtggtggctcacacctgtaatcccagcactttgagaggccgaggcaggcagatcacctgaggtcaagagttcaagaccagcctggccaacatggtgaaaccctgtctctacgaaaaatacaaaaattagctgggcatgatggcaggtgcctgtaatcccatctactcaggaggctgaggcaggagaatcgcttaaacccaggaggtggaggttgcagtgaactgagatcactccactgcactccagcctgggtgacaaagtgagactccccccaaaaaaaaaaaaaaaaaaaaaagcagcagcatttgtaaagcacacctggcacattctgggctattaacaaggaaatgcatgcagctcccgtccacctttttcaacctcagttctatttcttctggattcctgtgtcctac

SEQ ID NO: 167 - DNA, 801 bp, Homo sapiens
  misc_feature (401)..(401): Y = C/T
tatcaacattttgaagcctcaatttcttcatctcagctggtgataataatagcatctatgttatagcaccatagtgagcattaaataaaattatgtaatgaatttagccaagcaataagcagaaagtatatacacacaatatatatttgtcattatatgatttcttcagcaacaaattccaatgagactagcacctctgccaacactggatccagtgtgatctccagtggagccagcacagccaccaactctgggtccagtgtgacctccagtggggtcagcacagccaccatctcagggtccagcgtgacctccaatggggtcagcatagtcaccaactctgagttccatacaacctccagtgggatcagcacagccaccaactctgagttcagcacagygtccagtgggatcagcatagccaccaactctgagtccagcacaacctccagtggggccagcacagccaccaactctgagtccagcacaccctccagtggggccagcacagccaccaactctgactccagcacaacctccagtggggctagcacagccaccaactctgactccagcacaacctccagtgaggccagcacagccaccaactctgagtccagcacaacctccagtggggccagcacagccaccaactctgagtccagcacagtgtccagtagggccagcactgccaccaactctgagtccagcacaacctccagtggggccagcacagccaccaactctgagtccagaacgacctccaatggggctggcacagccaccaactctgagtccagc

SEQ ID NO: 168 - DNA, 601 bp, Homo sapiens
  misc_feature (301)..(301): N = A/C/G/T
aagcacatgcctccagaggtgctggacaccttcagtattgatgccaagacaggccaggtcattctgcgtcgacctctagactatgaaaagaaccctgcctacgaggtggatgttcaggcaagggacctgggtcccaatcctatcccagcccattgcaaagttctcatcaaggttctggatgtcaatgacaacatcccaagcatccacgtcacatgggcctcccagccatcactggtgtcagaagctcttcccaaggacagttttattgctcttgtcatggcagatgacttggattcagganacaatggtttggtccactgctggctgagccaagagctgggccacttcaggctgaaaagaactaatggcaacacatacatgttgctaaccaatgccacactggacagagagcagtggcccaaatataccctcactctgttagcccaagaccaaggactccagcccttatcagccaagaaacagctcagcattcagatcagtgacatcaacgacaatgcacctgtgtttgagaaaagcaggtatgaagtctccacgcgggaaaacaacttaccctctcttcacctcattaccatcaaggctc

SEQ ID NO: 169 - DNA, 601 bp, Homo sapiens
  misc_feature (301)..(301): N = A/C/G/T
gcgggcaacccatgcttgcatccagtgtctctgtgtgggtcagcctcttggatgccaatgataatgccccagaggtggtccagcctgtgctcagcgatggaaaagccagcctctccgtgcttgtgaatgcctccacaggccacctgctggtgcccatcgagactcccaatggcttgggcccagcgggcactgacacacctccactggccactcacagctcccggccattccttttgacaaccattgtggcaagagatgcagactcgggggcaaatggagagcccctctacagcatccgcantggaaatgaagcccacctcttcatcctcaaccctcatacggggcagctgttcgtcaatgtcaccaatgccagcagcctcattgggagtgagtgggagctggagatagtagtagaggaccagggaagcccccccttacagacccgagccctgttgagggtcatgtttgtcaccagtgtggaccacctgagggactcagcccgcaagcctggggctttgagcatgtcgatgctgacggtgatctgcctggctgtactgctgggcatcttcgggttgatcctggctttgttcatgtccatctg

SEQ ID NO: 170 - DNA, 801 bp, Homo sapiens
  misc_feature (401)..(401): N = A/C/G/T
atgtgctgtgtccaggtgcctacagtctgtgtgcgtccgagcatgggctctacctggacacagtgaggagcgagattaaatacctggatcacagccgagtccaaagcctaggacttcatcctgggagcagtgcgtagggatggcggtcgtcccgccacagccttggctccgccatctttgaaatggccccatcacccaaaacgctcctccttctgaaccccagagctccactctgcacccatgctctagcctcacaccaaggactttcttggtaagagacggacagttcggtgaagtgattaaaagcctacaggcttagataatggaagagagagctccgtcctcacactcctttctgctgagcatgaaatgcctggttactcaccagttgtgaagacttngtttgtgaatgagacggtcagttcagcggtggcttctgagaattctaagaaagcaaaacaatgttaggtcttccccgtggttccctatatcctctagatatctccattccccttttgagatatctaggctccctgaaacccctttctctgacacactgcacagacactgaagacagacaaattcgaaaggtgtaagacttatcttccatgaccggcttagtaagaagcagatccgttcagcaattgatagacacttggttttttttccacgttttgctgttatgaatattgctgctgtgaacattgacgtacaggtttttgtgtgaacataagttttctgttctcttgggtacacacccaggggtggtggaatcactgggtcatacagtaactctgtgtt

SEQ ID NO: 171 - DNA, 602 bp, Homo sapiens
  misc_feature (201)..(201): R = A/G
gattttgcaattagggctaaaggattgtgggtctgtgctccatttgatagtaatctctttcccttagatgggaagagacagaaatgatcctcatagaatatttatagtccaaattctgtcaacagtgtaagcagtcataagatttatagatcttttagttagatattattgatttggttttcctttactttctagctcctrtgacttctagaagtacatctacttggagaatacccagcaggaagagacgtaagagcaattaaaaactcttgatgtaacaaatgtctttatttgctgcaaaagctacattcactttttatgttatatcctttaaaataaaaaattaatttgttgggattttagatgatttgcattttacattttcaattagatgagttgggctggtataaaacataagcctcaaaatgttcaaaggcacaagtgcaacataagtttatttttcactcacataaataggataaagtagttcctgagtagagggggtgcccacacagtcattcagggcccagctgatgggggctctgacatctttaagatgttgcttccatggttcccttggataagaaactgagatggaagca

SEQ ID NO: 172 - DNA, 1046 bp, Homo sapiens
  misc_feature (845)..(845): S = C/G
tttgagatgtgaagttaaacctaaaatcttgatgagtttaaagtttaattatttttttggcaagaatacttcatagacaatgctgtatacctcacattgtctcacatacgaaagtatgtaatgtttgattgtcttattttggtgatgcttatctaaggtcgatttgtttgtttcaaactgaaattaaacatttccattcaaccaaaatcaaaactgtaaaaccaagtgcattcagagaagtctcacatttatccctgctcttctatctggtctcttccctcttcttaaaggcaatcagtttttgggtttttgcatggtttgttttaacaaatataagaaaattcacacacacctttcttacacaaaaggcatactctgtacattatactacatactgtatactatatacactacatatattgttctgcattttgcttttttcaccttgaaatatatcccagatrtcactccatatcaatatatggagggttttttttatttttttcagttttagaggattccattttgtgaatgtaccatgttttgttcaagtagtcctatattgatgaatagtctggttattgtcaattttgctattacaaaaaaagtactacagttaacaatgtgcattcatcatcttgtttttggcaagtgtatatttggtaaagattactagaagtacgattgccgctcggaaggtaaaacatatataattttgctagatagtctataaaattattaagtctaatattaatttactttgtttctcccatcagaaagaagccaacaaaacatataactgtgaaaatttaggtctcagtgaaatccctgacactctaccaaasacaacagaatttttggaattcagctttaattttttgcctacaattcacaatagaaccttcagcagactcatgaatcttacctttttggatttaactaggtatgtatctgagttatttgtgtgctcttttattttatttaagttaaaatacagtatgtgcttaatttatttgcaggacctttttggggggcccagggacaat

SEQ ID NO: 173 - DNA, 863 bp, Homo sapiens
  misc_feature (75)..(75): Y = C/T
tgggaatgtttttttgttagtgatgatgtcatgccttgtgcaaaatctgtattagcatctcacaacataagattyggctctattctaacggcattttccaccactcgatgtccaccgtaatacttggctctcgaagaatcactgggctggctccctcacttcatgcaggtctattctattatcacttactcagagatttctctggccttttcttcacagcacttacaaaatgcgatctattacatattaatttgcttwtttgcttcttgttttcctatactcccatccctcccagaagctccaagagagcatactgttktatccctagggcctagaataatgcgtccacgtagtaggtactcaaaattttttgcttgacaggctagaaaaggtgaataaacacaaagcgggagcgaaaagtctacttctaggtcaggcactctttggacttcacgcaacgtgtgagcgccacctctcgggaagccaatttgctcgcgaacgaaggaagtgagtcagagaacccgggggtggagagaagaaagcaagcagctaaccggaaaggtctgaaaaagctagcgccggaagttaaactgcagaaagttgttccctagaatgactgcctactcccaagaggaagcgtgggcgagcggtgttctgcaaaatgggytctccggcagcggatctgcgcagaagcgttccgtgcgtgcaagtgctgcgaaccacgtgggtcccgggcgcgtttcgggtgctggcggctgcagccggagttcaaacctaagcagctggaagggtaagaggtgttcgggatcctgagaggaaaaagaaaggagtgtagtcgcgggagtgggttaggtgaggagtta

SEQ ID NO: 174 - DNA, 643 bp, Homo sapiens
  misc_feature (369)..(369): R = A/G
ccccgcagccctctggagtggaggaaactgagacccactgaggttacgtagtttgcccaaggtcaagcctgggtgcctgcaatccttgccctgtgccaggctgcctcccaggtgtcaggtgagctctgagcacctgctgtgtggcagtctctcatccttccacgcacatcctcttcccctcctcccaggctggggctcacagacagccccctggttggcccatccccagtgactgtgtgttgatcaggcgcccagtcacgcggcctgctcccctccacccaaccccagggctctatgggaaggaccagcaggaggcagccctggtggacatggtgaatgacggcgtggaggacctccgctgcaaatacrtctccctcatctacaccaactatgtgagcatctgcaccagggttgggcactgggggctgaacaaagaaaggggcttcttgtgccctcaccccccttacccctcaggtggcttgggctgaccccttcttgggtcagggtgcaggggctgggtcagctctgggccaggggcccaggggcctgggacaagacacaacctgcacccttattgcctgggacatcaaccagccaagtaacgggtcatgggggcgagtgcaaggacagagacctccagcaa

SEQ ID NO: 175 - DNA, 401 bp, Homo sapiens
  misc_feature (201)..(201): R = A/G
actgtgttataacactgcacaaagatcaagatctgattaaggatccacgaaatctattggctaatcaaactttagtatatagtcaagatctgggggagatgactaaacttaattcaaagcgagtatcttttaagcttccaaaggatcaaatgaaagtctatgttgatgacatttatgttattcctcagcctcatttctcarccgaccaacctccattacctaaaaaaggacagagtagtatcaataaagaagaagtaatactgtctaaagctggaaataagagtttaaatattatagaaaattcctctgcacccatatgtgaaaacaagcccaaaatactcaatagtgaggaatggtttgctgcagcctgtaaaaaagaactgaaggaaaatattcaaaca

SEQ ID NO: 176 - DNA, 501 bp, Homo sapiens
  misc_feature (251)..(251): Y = C/T
ttcccaccaaaggcttttatagtctgccacattcataggatttttctcagtatacaatttttagacataatgtcctaaaatattttctcaaatgttttgtacatgttttctctgacacaaaacatgaagtaactgatcactaaataaacaaccatgtagtctgcattcatgaaattactcttctttgcagatatcttaagggcctacatctggcaagaggctttcccaaaatgactacctgtgaattctcytgtgtttaacaaggatagacaagtgcgcaaaagctttcccacaatcactacatccatagggcctctctcctgtatgttttctttgatgaacattgagccctgattttgtagtgaaggctttcccgcagtcactgcatttgtacggtttctctcctgtgtgaattctctgatgtgtaataagatcatttttgcgcaaagagaattttccacattcagtacatgcaaaggaagtctttcctgtgtgaaatcg

SEQ ID NO: 177 - DNA, 501 bp, Homo sapiens
  misc_feature (251)..(251): R = A/G
cgaaaaggaaaatgagctcccgtttcagggctctggggttgggatggaatggaacacaaccaccaaccattcatctccttgaattgtgtctccagactccatccaccaagattacacgacgcagaacttgatccgcatggccgtggcaggactggtcctcgtggctctcttggccatactggttgaaaattggcacagccatacggcactgaacaaggaagcctcggcagatgtggctgaaccgagctggrgccaacagatgtgtcagccaggattgacctttgcacgaacaccaagtgtctgcaagtaaacacctggaggtgaaggcagagaggagccaggactgtggagtccgacaaagctacttgaaggacacaagagagaaaagctcactaagaagcttgaatctacttttttttttttttgagacagagtctggctctgtcacccaggctggagtgcagtggagcaatctcggctcattgaacctcttgggttcaa

SEQ ID NO: 178 - DNA, 501 bp, Homo sapiens
  misc_feature (251)..(251): N = A/C/G/T
gcttggaaagccctgtctgctaagaaacgacacccactaggaacgggacctacaggtttaagctccggccggtgaggctggagaggcccatgggtactcttcatctcccaaggagctcccaaagtcctttcatctttttccttcccccatcctaatagggctgggttcagaaccgactgtgtctcaccagtggctgcagtgagggtgctgttatagcctctgacctcattcctctcggcccagacggtgangtggtacaggctgccagcttccagttcctttagggtgatgtcagtacctgaggtgctttgggtcctggggtcagtcatgccttccctgacccatgagacccagtagctgtaggaagactggcctgggccctggggagctgtccagcgcaaagcaatggtgctgttggtccagtcctgcttgctgaggcttgtcactgcgttggggactgggagagggagcagagtcaggatttccacatcccctagtcct

SEQ ID NO: 179 - DNA, 801 bp, Homo sapiens
  misc_feature (401)..(401): S = C/G
gtggtgcgatctcagctcactgcaacctctgcctcccgggttcaagcgattctcctgcctcagcctcctgagtagctgagactacagatgcgtgccactatgcccggctaatttttgtatttctaatagagacggagtttcgccatgttggccaggctggtctcaaactcctgacctcaggtgatccacccacctcagcctcccaaagtgctgggattacaggcataagccaccacgcctaggcaactgcttctcttcttaaaggtggaattgactatatacctagggactgcttgcttcctgttgcccagccaggtcagcaatcctctgctcattggccatggggctctgtctactctggggttgctgctgttggacttggctggggctgtccagaaaascgaggatgcaggactggagctggtaggtgaagatgtcaggtgaaattctgggagatgtttcttgatactctggaatgcaggtaacctcttccttcttacacctgaccccccaatttgtctttgcagctggcatgccccgtgcttcgatgtctaagcaacctgctaactgaggcagcagtggagactgtgggagggcaaatgcagctcagagatgagcgtgttgtggcagccttatttatccttctgcagttctttttccagaaacagcccagtctgctccctgagggcctttggctcctcaacaacctcactggtacgcaccataatctgcccaggcctggacatttggataatggggatatttcctcatggcctaggctgaggtgggtagtattgacag

SEQ ID NO: 180 - DNA, 501 bp, Homo sapiens
  misc_feature (251)..(251): R = A/G
ctatggtgtgctttgctccatgacctaacgctacaattcatattccaaagaaaaatcccggtccaaagaaactccccatgccatgtttgtttcaaagagtccacaggtttgggagtcgtgtgttctctttgggcaagcatatgagctctttctctctaaattgcatttaatttgaaatggcctccatcttttgcagaaatgtgaattcctcctcttgaaggtctactgtgattcgaaaagctgctttttcrcctcagaaccgtattatgtaagtaacagccaaacaaaaatgcttatactggcatttgtcaaatctgtgatctgaatcccatggcacaaggtgccattctatttggcttgttgatgagtttttagttcaggctactatagaaatttatcatagattaggtggcttaaacagcagaaatgtttttctcacagtcccggaggctgcatgtccaagatcagggtgtcagtagggtccggttctggagagggctg

SEQ ID NO: 181 - DNA, 601 bp, Homo sapiens
  misc_feature (301)..(301): K = G/T
ctgggtgattggaaaaccctctgctaagattaatactgaacacttagcccaggaagatagatttttcctctagtttacatgtgtaagtagcttttttcctatcagaatgttcttttagggatggtgattcctgtttgtatgtttgtttgaatagtttttccttaacacttgagtgttcatttgacttaaatttataaaataatcattttctagtggacagttcttgtcttttctgttttaaaagtcacattgaatattttaacaggtttgtgtcccagacactttaaattcctctcaagakaaattatttggacctgtcaaatcttctcaagatgtatcactagacagtaattcaaacagtaaaatattaaatgtaaaaagagccaccatttcatgggaaaatagtctagaagatttgatggaagacgaggatttggttgaggagctagaaaacgctgaagaaactcaaaatgtggaaactaaacttcttgatgaagatctagataaaacattagaggaaaataaggctttcattagccacgaggagaaaagagtatgtattaagaactcatacttctatgcttgtcttcttattctgaag

SEQ ID NO: 182 - DNA, 601 bp, Homo sapiens
  misc_feature (301)..(301): Y = C/T
gtctctcatttcatcctcacaatccatgaggcaggtatgactattcttcccattatccagagagggaaaacaagtcacacggaagcaagtcacgcagcagagctaggattggaacagaagtgcctgcatcctccaacgcctgcatcccaacccgctgtgctatgcctcccgttgatgctttcccatgtctgccatttagctttgctctggtgagtgacaagctgtaccagcggaaagagcctgtcatcagttctgtgcacaccaaggtgaaggggatagcagaggtgaaagaggagatcgyggagaatggagtgaagaagttggtgcacagtgtctttgacaccgcagactacaccttccctttgcaggtgagcacctcgtagcattctcccaggctcgtcgctggtcaccgtcgccagggcctagctcccttcccctaggatctacagcctcactccagaaaaaacgctggtcctattttaaaagctctgtgaacatcccaactgagaaaacctaaaaattgcaaaactgggtgagatccaggagatgattctttgctttatcaagtcctacagggtttctcaaaatagcctcatgtcct

SEQ ID NO: 183 - DNA, 801 bp, Homo sapiens
  misc_feature (401)..(401): R = A/G
cttccccttcatcttcgagggccgctcctactctgcctgcaccaccgacggtcgctccgacggcttgccctggtgcagtaccacggccaactacgacaccgacgaccggtttggcttctgccccagcgagagtgagtgagggggctcgccgagggctgggggcgcccaccacccttgatggtcctgggttctaattccagctctgccactagtgctgtgtggcctgcaattcaccctcccgcactctgggcccaattttctcatctgagaaatgatgagagatgggatgaactgcagaccatccatgggtcaaagaacaggacacacttgggggttataatgtgctgtctccgccttctccccctttcccacatcctcctcgccccaggactctacacccrggacggcaatgctgatgggaaaccctgccagtttccattcatcttccaaggccaatcctactccgcctgcaccacggacggtcgctccgacggctaccgctggtgcgccaccaccgccaactacgaccgggacaagctcttcggcttctgcccgacccgaggtacctccaccctgtctaccaggttcagccccgccctctcatcatgtattggcccccaaaacgcggctcttccctcccatcagtttgtctttccactctcattggtcctcaggacgaccgtgactccgcccacctacaccacatttccaccactatccctgacttccaatggccccgccccagccactaaggttcggccttttctgcccagctggccgcctcttccttggtctggtgtc

SEQ ID NO: 184 - DNA, 801 bp, Homo sapiens
  misc_feature (401)..(401): R = A/G
agttctggttgggtgcagtggctcacatctataatctcagcactttgggatgccgaggtgggcagatatttgaggtcaggagtttgagaccagcctggccaacatgttgggaccttgtctctactgaaaatacaaacattagctgggcttggtggtgggtgcctgtaatcccagctattcgggaggctgaggcaggagaatcacttgaaccagggaggcgaagtttgcagtgagcccaagattgatccactgcactccagcctgggtgacagagtgagactgtctcaaaaaaaaaaaaaaaaaaaaaaacctgagttttaacttggtgactgttgactccctcctgacagcgaggcggtggtgaaccgagtgtttgacaagctgtccccgctgcacgagcrcatctactgtgcactctctggttcagctgctgatgcccaagccgtggccgacatggccgcctaccagctggagctccatgggtatgaagctctggagttctgactccccacccactagagctcccccaacctgcatgaatccctgtacagtgtgctgttccaggagctggacactgggaaatggaaaagtcttgtttcggctcttgctggcacttgaatctgtcagtttctgcatctgtaaagtggagataatatagtacctcatgagacggttattttgagaaccacattctatatgtgaacacagtttaaaagctgtaaatcactatcctgatataaataatcaggaagaaggtgatattgtgacccaccataatatcaggcagttaccatacgagaa

SEQ ID NO: 185 - DNA, 601 bp, Homo sapiens
  misc_feature (301)..(301): R = A/G
gataattacagtgatctggaagtcaccgattcccatactgttttcattgactgtcaagccacagagaaaatacttgaagaaaaccctaaatttggaataggaaaaggaaaaaacttgggtgtttcctttcctaaggataatagctgtgttcaagaaatcgctgaaaaacaagcactggctgtaggaaacaaaatagttcttcacaccgagcaaaagcaacaactctttgctgctactaatagaactactaatgaaatcatcaaatttcatagtgctgctatggatgaaaaggtcatagggraagttgtagaccaggcctgtacattggaaaaagcgcaagttgaaagctgtcagttaaataatagagatagaagaaatgtggactttacaagtagtcatgcaactgctgtttgtggatccagtgataattattcctgtttaccaaatgttatttcctgtactgataatttggagggtagtgccatgctcttatgtgataaagatgaggaaaaagccaattattgcccagtgcaaaatgatcttgcttatgcaaatgattttgccagtgaatattacttggaatctgagggacagcctctct

SEQ ID NO: 186 - DNA, 201 bp, Homo sapiens
  misc_feature (101)..(101): R = A/G
atctcggcaggagctttgcagtgaatatcgaaagcttgtgaggaacggaaaacttgcttgcaccagagagaacgatcctatccagggcccagatgggaaartgcatggcaacacctgctccatgtgtgaggtcttcttgtgagtagccctgcagctgggaacatggaggaatgattttgttctttctatttcatttccatg

SEQ ID NO: 187 - DNA, 601 bp, Homo sapiens
  misc_feature (301)..(301): Y = C/T
ttactccttagggtcaaaaccttgacagcagggcccgtatcttttccttcctcgataacctctgtaacacctcgcacaggactgaatacagaggaagcatttgattgtatgattcccactggtggaactaatagccttatattctttccctggagtgaaagaaaactctatattttactatacttacccatttcaattttacaagcaagaatgctgtgctggtgaaaataaactgcttcttcaataactttaaaggtttgaatatcccagaagccgtcagtacttaaaccagccaaaaacytctcattttttatagttggtcttcctgctctccaatgtgtatatgacagtggggtcttatcaaaccacataagagaattatctagagaagaaacatttttttcctatgcttagagattaaatcaagacttgaattacacttatacagttaagatttcaaacttgactaattttctcttttcccaaccttctaaaaggttgtatgattatgtataaccctttaagatattttctgattataacagtaaatcatgctcatttttaatttgaatataaatacaaactataaatattgacctat

SEQ ID NO: 188 - DNA, 601 bp, Homo sapiens
  misc_feature (301)..(301): R = A/G
ttgaagaaggtgcacagtgccctgctcctctttcctatgtccccagaattctcttagggttctcagatgccatgactttcaaggagagagtacggaaccacatcatgcacttggaggaacatttattttgccagtatttttccaaaaatgccctagaaatagcctctgaaattctccaaacacctgtcacagcatatgatctctacagccacacatcaatttggttgttgcgaacagactttgttttggactatcccaaacccgtgatgcccaatatgatcttcattggtggtatcaactrccatcagggaaagccattgcctatggtaagtcacctctcctttagcacattaggaataatctggctttggaaattaaaaaaagattccttactgaattgtgatttgacattttcatttgttgcatttcaaatttctttccagtttaacagattattttgtgccaatttatgtactcatcagttatcaaattttataaaactgcccttcttgaaggtgtgtgtatataatttaaaaattgtagatcgtattcagcttacatttttgagtaccatgtttagaaaagtaccaaaaaccacagt

SEQ ID NO: 189 - DNA, 801 bp, Homo sapiens
  misc_feature (401)..(401): H = A/C/T
tatttttcatgggtgtatccatattctaacatttcttcaccctccaaatttcagactttggcagtgaatctatggctctgcaattttagtgttccatgtaacaacgaataggaaaatgctgcttctaccctctcgaaagctattttgctaaagagctaagatgctaaaagctaaatatgtaactaaatagttgcaaatctcagtaactgacaaatacagtcatggggttggggatgctgtttagacagctgaaaataagacctgaattgtttatttttaaaatgttgcaaaagagaggcagcaaatgggaatttttaattctgattcttggtatgttttagaacaatgatttgttctttcttatactttcaggtgtttccaatgtggacactgaagagachaattcttatcctttttaacataatcctaatttccaaactccttggggctagatggtttcctaaaactctgccctgtgatgtcactctggatgttccaaagaaccatgtgatcgtggactgcacagacaagcatttgacagaaattcctggaggtattcccacgaacaccacgaacctcaccctcaccattaaccacataccagacatctccccagcgtcctttcacagactggaccatctggtagagatcgatttcagatgcaactgtgtacctattccactggggtcaaaaaacaacatgtgcatcaagaggctgcagattaaacccagaagctttagtggactcacttatttaaaatccctttacctggatggaaaccagctactagagataccgcag

SEQ ID NO: 190 - DNA, 801 bp, Homo sapiens
  misc_feature (401)..(401): R = A/G
actggacctgcggccccaagggctggagctgtttgagaacacctcggccccctaccagctccagacctttggtgaggattgaagaagccagcagggagaaggtgggggtggggtatcctgcaatgcggtgcctgtggccacaggatcttttgagatgggtgtggccccggctaaggggtgcatgtgttctaggcgtatgtgacctaggctgctgagtggccctggaagaggatctcgcaggagggggaatgaaatgccccagagaagggcttcgggacgtccatccctgtctgctcacacctttcttctctccctagtcctgccagcgactcccccacaacttgtcagcccccgggtcctagaggtggacacgcaggggaccgtggtctgttccctggacrggctgttcccagtctcggaggcccaggtccacctggcactgggggaccagaggttgaaccccacagtcacctatggcaacgactccttctcggccaaggcctcagtcagtgtgaccgcagaggacgagggcacccagcggctgacgtgtgcagtaatactggggaaccagagccaggagacactgcagacagtgaccatctacagtaagaaggggcaggggcggagtggggcttcttgggggtgtgacctgaacccggggcggggctcactgtgtgcctattccaggctttccggcgcccaacgtgattctgacgaagccagaggtctcagaagggaccgaggtgacagtgaagtgtgaggcccaccctagagccaaggtgacgctgaatggggttccag

SEQ ID NO: 191 - DNA, 601 bp, Homo sapiens
  misc_feature (301)..(301): S = C/G
actcagttcagaacatctttggtttttacaaatacaaattaactggaacgctaaattctagcctgttaatctggtcactgaaaaaaaattttttttttttcaaaaaacatagctttagcttattttttttctctttgtaaaacttcgtgcatgacttcagctttactctttgtcaagacatgccaaagtgctgagtcactaataaaagaaaaaaagaaagtaaaggaagagtggttctgcttcttagcgctagcctcaatgacgacctaagctgcacttttccccctagttgtgtcttgcsatgctaaaggacgtcacattgcacaatcttaataaggtttccaatcagccccacccgctctggccccaccctcaccctccaacaaagatttatcaaatgtgggattttcccatgagtctcaatattagagtctcaacccccaataaatataggactggagatgtctgaggctcattctgccctcgagcccaccgggaacgaaagagaagctctatctcccctccaggagcccagctatgaactccttctccacaagtaagtgcaggaaatccttagccctggaactgccagcggcggtcg

SEQ ID NO: 192 - DNA, 801 bp, Homo sapiens
  misc_feature (401)..(401): M = A/C
aggaagatgtacgtcccatcttctgggcctccagaccaaagagttacatctaccgtacccaggagtgggacgagttccctaacggccgctggtgagggcctgcagaccttccttgcaaatacatctttgttcttgggagcgggagggcagaagaagtttgcatgcttgtggttgacctgggaggagtcaggggcagaatttacaggaatggcctcctgggcatgtggtggcactgccctctgtcaggagtgtgccctgacctctgggcacccctctgccaggggcaattcctcttcccctgcctttggggagctgaaggactactacctcttctacctgaagagcaagtcccccaaggaggagctgctgaagatgtggggggaggagctgaccagtgaagmaagtgtctttgaagtcttcgttctttacctctcgggagaaccaaaccggaatggtcacaaagtgagtgatgctggagtggggaccctggttcatcccctgcccctggcctgaccccagctgcaggccaggctgcggggctgtgacttccccatcctgtgccctcccctccatgctgtggacatggcaaagggagaagggtaagttgggagacctccacctggaagggcttagggaggcaaagacaggctgggtctttgttgggggccgtgagagggactcagggtgccaaacctgatggtcgccccagccagctcaccgtctctcccaggtgacttgcctgccctggaacgatgagcccctggcggctgagaccagcctgctgaaggaggagctgctgcg

SEQ ID NO: 193 - DNA, 801 bp, Homo sapiens
  misc_feature (401)..(401): S = C/G
actgctacaaatagaaatctttttcttcttctcttggagagccacttgttgaacacttaccagctcacctgtgcttgaaagtatttcttcaaataaaatgaaagctggttagctttgaaaattttttgtataaaagtttacacgggaaaaaaataaactaatttttttttccacctgtgttttcagggatacgaaaagaccgaagaggagggagaatgttgaaacacaagcgccagagagatgatggggagggcaggggtgaagtggggtctgctggagacatgagagctgccaacctttggccaagcccgctcatgatcaaacgctctaagaagaacagcctggccttgtccctgacggccgaccagatggtcagtgccttgttggatgctgagcccccsatactctattccgagtatgatcctaccagacccttcagtgaagcttcgatgatgggcttactgaccaacctggcagacagggagctggttcacatgatcaactgggcgaagagggtgccaggtaagaatgcgaagcgcagcttttaagagtcaatagcttttcaagaacttgttgtgatgtcatgggagaaatagtgggggaaaaagaagcaataacatgttatgtaattggtttcaaggttacaggagatgtgttcattttcagtatcaatacactgtaattttccaggagattaggaaataatatttttaaatcagaatctagaagactgaaattcttaaattgacataatttatttttaacccatctcatttaccaaaaagatttagggtggacact

SEQ ID NO: 194 - DNA, 801 bp, Homo sapiens
  misc_feature (401)..(401): Y = C/T
tcttttctatggccaccaagtgcaggcctgatttgcttggctgctcaaggcaggacagtgtgggagtttggagcaatccacccccactcttggaactgggctctgagccacctcccctgagagtcatctctggggtcagaagcatatcagtcatgagcccagccactcactgttttagttcaggctgtgctgtgctgttggaaggtgcaagatcagagcccccaaagcagaggactctctctgcccagtccctgtggtctcttcatccctcgccttgaacaggtggaggccagcctctcctgactgtcatccctattggcaggttaccccaaaggccaccccgaagcagggagctttgaggctgacctgaagcacttgaaggagaaggtgtctgcgggagycgatttcatcatcacgcagcttttctttgaggctgacacattcttccgctttgtgaaggcatgcaccgacatgggcatcacttgccccatcgtccccgggatctttcccatccaggtgaggggcccaggagagcccataagctccctccaccccactctcaccgcaccgtcctcgcacaggctgggggctctgggtggagtgctgagttcgctgagttcttcccagatctcctctcaggtccagaacttgcacagcgttgcttggccaccccattttggttacctctaattttccccccaaaacccagcaacagtgtctgttgaggggtttgttgtactttggccaacaagcatcaccaaaagggattctaattctcattacaaatcctgcttaaatcag

SEQ ID NO: 195 - DNA, 946 bp, Homo sapiens
  misc_feature (226)..(226): R = A/G
gttctgattgcctacaaggagtttggactttattgtggaggcagcggggagccaaggcaggttttagagtaggagagggtccaagcctgtgggtcacccttccgacttccctttccgaatgccaaacaccttcatgtcccccgtgggccccctttgtccctcccaccccaaactagccctcaatccctgaccctggcttccgcccccagccctctgacgtccatcrtctctgcggtggttggcattctgctggtcgtggtcttgggggtggtctttgggatcctcatcaagcgacggcagcagaagatccggaagtacacgatgcggagactgctgcaggaaacggaggtgaggcggggtgaagtcctcccagcccgcgtggggtctgcaccggcccccrgcactgacccaccaccccctcaccccagctggtggagccgctgacacctagcggagcgatgcccaaccaggcgcagatgcggatcctgaaagagacggagctgaggaaggtgaaggtgcttggatctggcgcttttggcacagtctacaaggtcagggccaggtcctggggtgggcggccccagaggatgggggcggtgcctggaggggtgtggtcggcagttctgatgggaggggcaagagctggaggcagtgtttgggggagggcagttacagcggagaagggagcggggccaagccctagggtggtgaaggatgtttggaggacaagtaatgatctcctggaaggcaggtaggatccagcccacgctcttctcactcatatcctcctctttctgcccagggcatctggatccctgatggggagaatgtgaaaattccagtggccatcaaagtgttgagggaaaacacatcccccaaagccaacaaagaaatcttagacgtaagcccctccaccctctcctgctaggaggacaggaaggacccc

SEQ ID NO: 196 - DNA, 511 bp, Homo sapiens
  misc_feature (256)..(256): R = A/G
tcgcaggcaaccctgcttaccgcagcttcagcaactccctgagccagtcaccgtgtcccagagagctgggtccagacccactgctggccagacacctggaggaagtagaacccgagatgccctgtgtcccccagctctctgagccaaccactgtgccccaacctgagccagaaacctgggagcagatcctccgccgaaatgtcctccagcatggggcagctgcagcccccgtctcggcccccaccagtggctatcrggagtttgtacatgcggtggagcagggtggcacccaggccagtgcggtggtgggcttgggtcccccaggagaggctggttacaaggccttctcaagcctgcttgccagcagtgctgtgtccccagagaaatgtgggtttggggctagcagtggggaagaggggtataagcctttccaagacctcattcctggctgccctggggaccctgccccagtccctgtccccttgttcacctttggactggacagggagcc

SEQ ID NO: 197 - DNA, 401 bp, Homo sapiens
  misc_feature (201)..(201): S = C/G
gtgaccagaccagacttttcagattgcttcctggaactgggcagggactcactgtgcttttctgagcttcttactcctgtgagtcccagagctaaagaaccttctaggcaagtacaccgaatgactcagtccagagggtcagatgctgctgtgagaggcacagagccctttccgcatgtggaagagtgggaggaagcagasggagggactgggcagggactgccggccccggagtctcccacagggaggccattccccttctactcaccgacatccctcccagcaccacacaccccgcccctgaaaggagatcatcagcccccacaatttgtcagagctgaagccagcccactacccacccccactacagcattgtgcttgggtctgggttctcagtaatg

SEQ ID NO: 198 - DNA, 601 bp, Homo sapiens
  misc_feature (301)..(301): M = A/C
gacactggaagaattgtcttaccaagctcttgccctgttttctggagcacaacatgaaaagggatgaagatcctcacaaggctgccaaagagatgcctttccagggctctggaaaatcagcatggtgcccagtggagatcagcaagacagtcctctggccagagagcatcagcgtggtgcgatgtgtggagttgtttgaggccccggtggagtgtgaggaggaggaggaggtagaggaagaaaaagggagcttctgtgcatcgcctgagagcagcagggatgacttccaggagggaagggmgggcattgtggcccggctaacagagagcctgttcctggacctgctcggagaggagaatgggggcttttgccagcaggacatgggggagtcatgccttcttccaccttcgggaagtacgagtgctcacatgccctgggatgagttcccaagtgcagggcccaaggaggcacctccctggggcaaggagcagcctctccacctggagccaagtcctcctgccagcccgacccagagtccagacaacctgacttgcacagagacgcccctcgtcatcgcaggcaaccctgcttaccgcagctt

SEQ ID NO: 199 - DNA, 511 bp, Homo sapiens
  misc_feature (256)..(256): Y = C/T
gagaatgggggcttttgccagcaggacatgggggagtcatgccttcttccaccttcgggaagtacgagtgctcacatgccctgggatgagttcccaagtgcagggcccaaggaggcacctccctggggcaaggagcagcctctccacctggagccaagtcctcctgccagcccgacccagagtccagacaacctgacttgcacagagacgcccctcgtcatcgcaggcaaccctgcttaccgcagcttcagcaacyccctgagccagtcaccgtgtcccagagagctgggtccagacccactgctggccagacacctggaggaagtagaacccgagatgccctgtgtcccccagctctctgagccaaccactgtgccccaacctgagccagaaacctgggagcagatcctccgccgaaatgtcctccagcatggggcagctgcagcccccgtctcggcccccaccagtggctatcaggagtttgtacatgcggtggagcagggtggcaccc

SEQ ID NO: 200 - DNA, 511 bp, Homo sapiens
  misc_feature (256)..(256): K = G/T
agctcacatctcccaagcagctccccagagcacctgggtctggagccgggggaaaaggtagaggacatgccaaagcccccacttccccaggagcaggccacagacccccttgtggacagcctgggcagtggcattgtctactcagcccttacctgccacctgtgcggccacctgaaacagtgtcatggccaggaggatggtggccagacccctgtcatggccagtccttgctgtggctgctgctgtggagacaggkcctcgccccctacaacccccctgagggccccagacccctctccaggtggggttccactggaggccagtctgtgtccggcctccctggcaccctcgggcatctcagagaagagtaaatcctcatcatccttccatcctgcccctggcaatgctcagagctcaagccagacccccaaaatcgtgaactttgtctccgtgggacccacatacatgagggtctcttaggtgcatgtcctcttgttgctgagtctgcaga

SEQ ID NO: 201 - DNA, 801 bp, Homo sapiens
  misc_feature (401)..(401): N = A/C/G/T
agtctggctgcccctcagccctggagtggggccgggaagctggagtcagctgtcttgctgggggaccccagctggttttgggctgaagggaagtgtgcatggggctgagaaggggtcacatgggggctgaggtggctgctactcaccagtggtgccatcggccgtgagggggccataccgcttcttgttcgcaattccaaacagagtgaatctgtacttgtggtcagggtccagtgaggagacaacaaatgaacgctcgggcccttccacaggtaccacctggggccgtccatccctgtccctgtactggaccatgaaggtgtcaaactggccctcagggacagtccaggagaggtgcagtgaatctggggtagggtctgtcacccacaggtttcccaggnggggtggagtccctggacttgggtcactctgaggcactaggaagagtgggtagagagaagggagagacttaggtccaaggagaatggggaagccaaatcccacataggaatgctgtgtgaggctgtgcaggttgttcactgcacaaaagtgcatttgctgagggagtacagagggactgaaatccagccagcactctgcttgccgagctgtgtgccctggtgaggagtggtgtccactttaaggaatgggtgccttctttcaaacggcatggaagcactgcgtggactagtgtggctctgcctccaaccacaaaccagagcagcagggagcttcagaaagaggggagcccagccaggccctttcacatctccatagccagggaaatcttcccagtacaac

SEQ ID NO: 202 - DNA, 601 bp, Homo sapiens
  misc_feature (301)..(301): Y = C/T
ctgcctccctgtttgcctctagggtggtgttgatgatgaggtctccttgactgcgtatgtcacagctgcattgctggagatgggaaaggatgtagatgtaagttctcctggctcctgctcttgataccctccttctcatgcgtattcctagagacattcacccatctttgtctctagtcacccttttaaggtcaagaaggataagatgatttcctgattacttgccatttttaaaggaatgccttataagttatagtcttcatcttcactttttaggacccaatggtgagtcagggtctayggtgtctcaagaattcggccacctccacgaccaacctctacacacaggccctgttggcttacattttctccctggctggggaaatggacatcagaaacattctccttaaacagttagatcaacaggctatcatctcaggtatgttggtcctgttgagagttctttgaaattgtgaacataagctgtgagttatctataatctccctagtaacctctgtcccacacatgtactctaggattcattttagtaacagttattaagtcatcaaattattgttgggaggtttgtgagaaacacac

SEQ ID NO: 203 - DNA, 601 bp, Homo sapiens
  misc_feature (301)..(301): N = A/C/G/T
ggctgggatcctctggcagccctgggtcccagcctcccgtgactctgcccatccccctcatcctcaccacccctggccacataccttttcttggcacctcgtcctgggcactgccttcattgtccctttgtggtctttgttctgagagaggctctgaggttctccctggccctggggcttaggcagaggtcatacagtcttattttcttgtccgctgggtcccagctgggcccgggaacctgctggggtagccacctgactgccacctcccttccctcagaatgtgtcgagccactgggcntggagaatgggaacattgccaactcacagatcgccgcctcatctgtgcgtgtgaccttcttgggtttgcagcattgggtcccggagctggcccgcctgaaccgcgcaggcatggtcaatgcctggacacccagcagcaatgacgataacccctggatccaggtatgcctggggatggccctggggcggggcaatggagagaaggctcgatgaatgtttctgcatttgggggttaccccaggagggttcatcactggggttcaggtggcaaggtaacaggttcccatggatgaagtatctg

SEQ ID NO: 204 - DNA, 801 bp, Homo sapiens
  misc_feature (401)..(401): K = G/T
aaaatttaaaacataaaataaaaaaagaagttaactcagaggaggaggtttctgatgagaaaggctagattaggaggcactgtaatggatcaaatgccctactgagttaattcatagtgacttttgaagagtataaaattccatttatttgctttacttctccatctcttgttatatctcctaaatataccagtaacatttctttgctctgtttccttccttcctttcttccttccttctttccttcttcctccctaatcaaaggttcccatcaaatacaataattcttagggaaaaatgttatgctttttattattttactaaaatactacaatttaaacatttttcatattttttttccagagggaaacagtcttttcctgcttccagacatgaatcakgtcactattcaatgggatgcagtaatagccctttacatactcttcagctggtgtcatggaggtatggtgttttatgtatctattgctatctttcattcaacaaatggaatattgagtgattatcattttcatggttttatgttagaatctctgaagaatacaaatattattagactagaaaaaatgtgtgcataaaaattacatagaatgaaataaaaatggcccaatctccttccaaatgcaggatttctttctcaaatttcccttctagacagccctcttactcacatgtggatatttccacaaaggagcttattagtttgagttggcatgttctattgtcaaactattataactgttatataattacctgtcaaacatttggatgcaattctatttc

SEQ ID NO: 205 - DNA, 801 bp, Homo sapiens
  misc_feature (401)..(401): Y = C/T
aattcaagaacccaatagggaaaattctttccactctagtattgaagctatttgggaagaatgtaaagagattgtgaaggcctcttccaaaaaaagtcatcagattgaggaactggaacaacaaattgaaaaattgcaggcagaagtaaaaggctataaggatgaaaacaatagactaaaggagaaggagcataaaaaccaagatgacctactaaaagaaaaagaaactcttatacagcagctgaaagaagaattgcaagaaaaaaatgttactcttgatgttcaaatacagcatgtagttgaaggaaagagagcgctttcagaacttacacaaggtgttacttgctataaggcaaaaataaaggaacttgaaacaattttagagactcagaaagttgaaygtagtcattcagccaagttagaacaagacattttggaaaaggaatctatcatcttaaagctagaaagaaatttgaaggaatttcaagaacatcttcaggattctgtcaaaaacaccaaagatttaaatgtaaaggaactcaagctgaaagaagaaatcacacagttaacaaataatttgcaagatatgaaacatttacttcaattaaaagaagaagaagaagaaaccaacaggcaagaaacagaaaagtaagctaaatgttattcaaaatattttaaaatacacaaagcattcattttgctatgcagctttaaaaaagttagatagtcatacttaatctggtaaagcgtagcatgtatgatgagtgaagaacttgaactttgtccatataaacctttgga

SEQ ID NO: 206 - DNA, 801 bp, Homo sapiens
  misc_feature (401)..(401): R = A/G
gaaaaattgcaggcagaagtaaaaggctataaggatgaaaacaatagactaaaggagaaggagcataaaaaccaagatgacctactaaaagaaaaagaaactcttatacagcagctgaaagaagaattgcaagaaaaaaatgttactcttgatgttcaaatacagcatgtagttgaaggaaagagagcgctttcagaacttacacaaggtgttacttgctataaggcaaaaataaaggaacttgaaacaattttagagactcagaaagttgaatgtagtcattcagccaagttagaacaagacattttggaaaaggaatctatcatcttaaagctagaaagaaatttgaaggaatttcaagaacatcttcaggattctgtcaaaaacaccaaagatttaartgtaaaggaactcaagctgaaagaagaaatcacacagttaacaaataatttgcaagatatgaaacatttacttcaattaaaagaagaagaagaagaaaccaacaggcaagaaacagaaaagtaagctaaatgttattcaaaatattttaaaatacacaaagcattcattttgctatgcagctttaaaaaagttagatagtcatacttaatctggtaaagcgtagcatgtatgatgagtgaagaacttgaactttgtccatataaacctttggaccataggttatgtgaaaagatcagcttataaaaatcatatgaaatattttctgaagaactcattcatagtttggatattccaaatttgtgaaaagatataattttgtaaagattgttaccatttcac

SEQ ID NO: 207 - DNA, 1543 bp, Homo sapiens
  misc_feature (85)..(85): Y = C/T
gacacttcagtgcatctctaatttgggaaatgatcaatggtcaacagaggggagactgtgtctagtagtttttacaattgtattyattaggcacaggaaaatgtaaactcagagagtctaagatagaaccaagcctccaggataaacttcagcaagcctaacccctttgtttctctttttctttctagacacttgtaacagcactaatctagaagtgagtacatatgagttctggtcctggcttagctaatttgggcaaaccgtttaacttctttgagacttaggtttccattctaacaaggtgtaggtgataatatccattttgtgcaaggtcattggtttttaccgtataacgtgtgtaggtgttacacacactgtaccatcccatacaaatgtgagttaatgtattttctgtctttattatctcttttacctgccttaatcaccaagacattgtgatctgtcactccatcttctccattaaactcttcaaccatttctattttttttggacaattacttatctcagtcatcatttcttataattccctgtctaaccctaaatgtctgtgagatccttgcccctcttctcaagtggttcaacacttaagaatggggacaattttatttttatttttatttttatttttatttttttgagatggagtctctcgctctgtcgctcaggctggagtgcagtgatgcaatcttggttcactgcaacctctgcctcccagattcaagagattctcctgcctcagcctcccgagtaactgggattacaggcactcgccaccgtgcctggataatttttgtatttttagtagagacaggtttccccatgttgtccaggctggtctcaaactcctgacctcaagtgatccacctgccttggtctcccaaagtgctgtaattacaggcatgagccaccacgcccagctgggacaattcttgttatatgttaatttcttaaaaccaccaaagtctattcaatatatgatatagtgattaagaaataaaggtgtacattgataaaaagtatgaagtttcacatatgcacattcttatagcactcataatggcatctgttaaatcttcatctaacttttaaaataaaatggcttgtaaaagctatgaattactaagctgtgggatgcttttgggatctcaagtagtaatgtggaagtctaggcactcagcactgtatggaatcaaaattcccagtggaatatggagagcagaaagattgggcagggagaacttgtgaaaatttaaacatgattttcaggttcatttggcaaaaaaaattaggtgacaatggatatttttaaaaaaacaccaccaacaagggcattgcctggccataatttattgagttattttaacactttcattctttgtgctttaggtattctgcttcctcatacttaaggtaattttgtaaaactttatggaagaaaaaacaatgacacacactcacacatagaatatttgtttattgctgttataataaattaataaaaaacccaagaaacctaaaacc

SEQ ID NO: 208 - DNA, 501 bp, Homo sapiens
  misc_feature (251)..(251): Y = C/T
atacatcagaaaactcatatgggagggaaaccttacacatgtagccaatgtgggaaagccttcatcaagaagtgtcggctcatttatcatcaacgaactcatacaggagagaaaccccatggatgcagtgtatgtgggaaggccttctctacaaagttcagtctcactacacatcagaaaactcatacaggagaaaaaccttatatatgtagtgaatgtggaaaaggcttcattgagaagaggcgtcttaytgcacatcatcgaactcatactggtgagaaaccctttatatgcaataaatgtgggaaaggcttcaccttgaagaacagtcttatcacacatcagcaaactcatacaggagagaaattatatacatgtagtgaatgtggaaaaggcttttcaatgaagcactgtctcatggtacatcaacgaactcatactggagagaaaccttataaatgcaatgagtgtggaaagggcttcgctttgaagagcccactc

SEQ ID NO: 209 - DNA, 601 bp, Homo sapiens
  misc_feature (301)..(301): R = A/G
gtgttccatgcagggacattgcaaatacatgaaagtcatcacaatggagatttttgctaccaggatgttgataaagatattcatgactatgaatttcaatggcaagaagatgaaagaaatggccatgaagcacccatgacaaaaatcaaaaagttgacaggtagtacagaacgatatgatcaaagtcatgctagaaacaagcctattaaagatcagcttggatcaagctttcattcgcatctgcctgaaatgcacatatttcagaccgaagagaaaattgataatcaagttgtgaagtctrtccacgatgcttccttggtttcaacagcccaaagaatttcttgtaggcccaaaacccatatatctaataaccatgggaataatttctggaattcttcattactcacacaaaaacaggaagtacacatgagagaaaaatctttccaatgtaatgagagtggcaaagcctttaattacagctcactcttaaggaaacatcagataatccatttagcagacaaatataaatgtgatgtatgtggcaagctctttaatcagaagcgaaacctagcatgccatcgtagatgtcacactggtgaga

SEQ ID NO: 210 - DNA, 601 bp, Homo sapiens
  misc_feature (301)..(301): Y = C/T
gttccctctgttggactccctgcccatattcttgtgggagtgggttctggagacatttctgtctgttcctgagagctgggaattgctctcagtcatctgcctgcgcggttctgagagatggagttgcctaggcagttattggggccaatctttctcactgtgtctctcctcctttacccttagggtgattctgggggtccacttgtctgtaatggtgtgcttcaaggtatcacatcatggggccctgagccatgtgccctgcctgaaaagcctgctgtgtacaccaaggtggtgcattacyggaagtggatcaaggacaccatcgcagccaacccctgagtgcccctgtcccacccctacctctagtaaatttaagtccacctcacgttctggcatcacttggcctttctggatgctggacacctgaagcttggaactcacctggccgaagctcgagcctcctgagtcctactgacctgtgctttctggtgtggagtccagggctgctaggaaaaggaatgggcagacacaggtgtatgccaatgtttctgaaatgggtataatttcgtcctctccttcggaacactggctgtctctgaag

SEQ ID NO: 211 - DNA, 801 bp, Homo sapiens
  misc_feature (401)..(401): Y = C/T
aatcataatcatattaaatgtttaactgatagtattttaaaagaatcttcaatcaagtgctaatcctcatcactaaataaacagcattctgaatagtcaagattgggaaatgtgataggtaattctacccactttttgtattgtttctttgttgaattatttttgaaaaccactacaaaattccttattttgagacaaggcaaatctaagcctttgtgcaccatcattgttccccaagcctggaaaacaaaagagagagcaagaggaaaattaaatgtacatgcaattaaacattcctgttggctaaagtaaaatctggcccacagcaatttactcacctggccacatttgcagatgatttcaccatttatttgatagtcggcacacttcttttgcagtgytttgttttctcttacaatgtaaagttccctataagtatcaaagggaaagaatcatcatggagaactgacaaaataccagtgtgtagttcatgggttattggacctggagctcatccgcatgcctgcggtattctacacggcattccttccttccctcctgcttcccaggcttgttattgcaactaaggcaatgcttctcttctacacatacctctcaaggggcatgttgcctttcataacttctttcaagtctgttggttatattaacttgactttagttgttcaaaaatttgagaacaaatgatgagcatacaaaaatacgtgccttggatcaaaatggctttggttcttacacttctcttttcctgccccagtgcagtttatttaaaacatagacatt

SEQ ID NO: 212 - DNA, 2408 bp, Homo sapiens
  misc_feature (713)..(713): N = A/C/G/T
aggccctgccaggaaaaatataagggccctgcgtgagaacagagggggtcatccactgcatgagagtggggatgtcacagagtccagcccaccctcctggtagcactgagaagccagggctgtgcttgcggtctgcaccctgagggcccgtggattcctcttcctggagctccaggaaccaggcagtgaggccttggtctgagacagtatcctcaggtcacagagcagaggatgcacagggtgtgccagcagtgaatgtttgccctgaatgcacaccaagggccccacctgccacaggacacataggactccacagagtctggcctcacctccctactgtcagtcctgtagaatcgacctctgctggccggctgtaccctgagtaccctctcacttcctccttcaggttttcaggggacaggccaacccagaggacaggattccctggaggccacagaggagcaccaaggagaagatctgtaagtaggcctttgttagagtctccaaggttcagttctcagctgaggcctctcacacactccctctctccccaggcctgtgggtcttcattgcccagctcctgcccacactcctgcctgttgccctgacgagagtcatcatgtctcttgagcagaggagtctgcactgcaagcctgaggaagcccttgaggcccaacaagaggccctgggcctggtgtgtgtgcaggctgccncctcctcctcctctcctctggtcctgggcaccctggaggaggtgcccactgctgggtcaacagatcctccccagagtcctcagggagcctccgcctttcccactaccatcaacttcactcaacagaggcaacccagtgagggttccagcagccgtgaagaggaggggccaagcacctcttgtatcctggagtccttgttccgagcagtaatcactaagaaggtggctgatttggttggttttctgctcctcaaatatcgagccagggagccagtcacaaaggcagaaatgctggagagtgtcatcaaaaattacaagcactgttttcctgagatcttcggcaaagcctctgagtccttgcagctggtctttggcattgacgtgaaggaagcagaccccaccggccactcctatgtccttgtcacctgcctaggtctctcctatgatggcctgctgggtgataatcagatcatgcccaagacaggcttcctgataattgtcctggtcatgattgcaatggagggcggccatgctcctgaggaggaaatctgggaggagctgagtgtgatggaggtgtatgatgggagggagcacagtgcctatggggagcccaggaagctgctcacccaagatttggtgcaggaaaagtacctggagtaccggcaggtgccggacagtgatcccgcacgctatgagttcctgtggggtccaagggccctcgctgaaaccagctatgtgaaagtccttgagtatgtgatcaaggtcagtgcaagagttcgctttttcttcccatccctgcgtgaagcagctttgagagaggaggaagagggagtctgagcatgagttgcagccaaggccagtgggagggggactgggccagtgcaccttccagggccgcgtgcagcagcttcccctgcctcgtgtgacatgaggcccattcttcactctgaagagagcggtcagtgttctcagtagtaggtttctgttctgttgggtgacttggagatttatctttgttctcttttggaattgttcaaatgtttttttttaagggatggttgaatgaacttcagcatccaagtttatgaatgacagcagtcacacagttctgtgtatatagtttaagggtaagagtcttgtgttttattcagattgggaaatccattctattttgtgaattgggataataacagcagtggaataagtacttagaaatgtgaaaaatgagcagtaaaatagatgagataaagaactaaagaaattaagagatagtcaattcttgccttatacctcagtctattctgtaaaatttttaaagatatatgcatacctggatttccttggcttctttgagaatgtaagagaaattaaatctgaataaagaattcttcctgttcactggctcttttcttctccatgcactgagcatctgctttttggaaggccctgggttagtagtggagatgctaaggtaagccagactcatacccacccatagggtcgtagagtctaggagctgcagtcacgtaatcgaggtggcaagatgtcctctaaagatgtagggaaaagtgagagaggggtgagggtgtggggctccgggtgagagtggtggagtgtcaatgccctgagctggggcattttgggctttgggaaactgcagttccttctgggggagctgattgtaatgatcttgggt

SEQ ID NO: 213 - DNA, 1088 bp, Homo sapiens
  misc_feature (836)..(836): W = A/T
tgagaaaaccctgtctctactaaaaatacaaaaaaaaaaaaaaaaaaaattagctgagcatagtgatgcacacctgtaatcccagctacttgggaggctggggtgggagaatcgcttgaacctgggaggtggaggttgcagtgagccaagattgcaccaatgcactccagcctgggtgacagaaccagggggaataaaactcaacaaatgctgaaagccaaagatacgcagcaatccacctaatttgcaaaattgacttttagatcccacacagtcttgagcagggcaggaataatcagagtaaaagccagtggagaactcttcctgaaatatttcttcccatctccttgttgtctacctgctcatcccaaaacataaatgtctgtgcattcaaatcagactggcctgataaatgctaccaaggaaacatagatttgtcctcacttacatagtgtctagtatagagatgatgccccatagatttcactctacaacacaaatacatacacccacatttatgcttcagtttctctaaatgagaagggattccattatttttacaggacagtaactaaatccaaataaagagcaaaattcacagtggattcccatgaattatgtctccccagagaaaatttcatttcagatttctggataagctcattttcaaaagtcagtttttaaaggataccctctgttcatggacagcagatattgcttattggttcagttggcatacttactgacaaaagcaataaagaatgagattgccaatagcaggaaaaatatcaacagtgaggcacaaagcagcttggggaatccggtattacttttgwgaggggcagtcctctccttggaagctgaagaagaagccaaattagttttatcagtaataagtttggtctttacttcctcttcttcctcctcctctttctctctcttttcttggatgacacacagttactaacggtatgacatttgaaatcacatgagaataggaatagaaaggatataataatattcactgtagaaactttaaaaaatacataaaagtacgaattcctacaattgaggataactgttatgcc

SEQ ID NO: 214 - DNA, 654 bp, Homo sapiens
  misc_feature (329)..(329): S = C/G
caggatggtctcgatctcctgaccttatgatctgcccgcctcggcctcccaaagtgctgggattacaggcgtgagccaccgcgctgggctaactttgcgatttttgagaaaagactagaggttgtgcgttgtttactgtgaccttccaccctgaggaatttcccacacagcgccctgttcccctgcttaagggcagacctagttgatgtgtgaatgttgaagatccccttaatgtaatggcttttaaccttctctttcaggggcctctcaaatctcctccgagacgttgataaagaaccttagtaacttgactatcaacgctagtagcsaatctgtttcccctctatcggaagctttactccgtcgagagtctgtaggagcagcagtcctcagggaaatcgaagatgagtggctttacagcaggagaggagtaagaacattgctgtctgtgcagagagaaaagatggcaagattgagatacatgttactcggcggagttcgtacggtatgttgatgtgatgtggccggggctgtccaattccggagagtgacactcataaattaagacctaattaagactccctagctctaggcccggtgcggtggctgaggcctgtaatctgagcacttcgggaggctgaggcaggtggatca

SEQ ID NO: 215 - DNA, 1485 bp, Homo sapiens
  misc_feature (765)..(765): Y = Y = C/T
ccccagggtgccaccctccccgagattccagaagagcaaaggggccggggatgaccccatcgccttctaagcccaacgggaaaggctcagcggctggcaaaggaaggaaccaatagtgtgtgtggagggagggtggggactccacagggaaaatgctaaagaggggctgcctctgtggctgtggtcaggagccactgtcctacagagagggcactggcctgggagctgacacttcagaagaggaaaggactccccaggtgaggaaatcacttggaaggtgaccttgaaggcgggggaggggaaggctacccgaaatgggagaaagcagtgcaggctgtcagtgccccagcaacagtaactgtccagtctcctctctctgcggtggcacttgcttgttttctgagaattcctttgactgaaaagatagtcttttattcaacagttggaaatgcaagcataaactcctctgagcaaggcaaatccaggactttaactctcaccaagaagtatttgcctggactagcaggtgctctccagaaagctggtttggggatgacgggagaatagagggacacagaaacagctaggatcttggatggcaacttttaccctttgatgactccacagcttgagggcgggggcaggaagcaagtgtggagtagctttctggggaaggcggtgctcaccccagcctttgtctgcagagccccacccagcagaggggcagtggcgggcagtggacgtggtcctagactgtttcctggygaaggacggtgcgcaccgtggagctctcgccagcagtgaggacagggcaagggcctcccttgtgctgaagcaggtgccagtgctggacgatggctccctggaggacttcaccgatttccaagggggcacactggcccaagatgacccacctattatctttgaggcctcaggtaaaagccttccacctgtgtccttggtcctcccgggctccctccaccaggacagcccaggtcccgattacagccacacatactgcctcccgttggccctggtgttctcacgctaatttgccctctgtgtgtgccctgcttctccccagtggacctggtccagattccccaggccgaggccttgctccatgctgactgcagtgggaaggaggtgacctgtgagatctcccgctactttctccagatgacagagaccactgttaagacagcagcttggttcatggccaacgtgcaggtctctggagggggacctagcatctccttggtgatgaagactcccagggtcgccaagaatgaggtgctctggcacccaacgctgaacttgccactgagcccccaggggactgtgcgaactgcaggtaagaaaatgaaaagcaaggccaggtgtggtggctcacgcctgtaatcccagaattttgggataccgaggtcggtggatcacctgaggtcaggagtttgagatcagcctggtcaacacggtgaaaccccg

SEQ ID NO: 216 - DNA, 801 bp, Homo sapiens
  misc_feature (401)..(401): N = A/C/G/T
gtggtcactcaccagctcctcgggggtgagctggtagaagcccatccacatggcctgctgcagagcctcctgccccacatgccacacgtacacatggaccccagcagtcgtggtgaaggtcccatcgctgaccgtgacgttgaacgagtagtggccacgaggcaggccctgggcggcgataatcttgccatcaggcgcacccactgagaagtgcctgcccagggtctcctcttctgccaggctataggtcagcgtgtcctgggggtctcggtctgtggcatggatcttacccaccatgccaccctggaactcatcctctccaacagtgatgaagatctccagtgggagagcagaaggtgcatagtggctctgctctgtgacatggacacggacagacgtcnaagacgagaggggagggatgccactgtctgacgcctgtgggcaaaacaaacactgctgtcacccaacagaactgcagtgctcttgcgcccgactgaggctgggcctccttgtggagctacgtttctctgccccacgcccaacttgagggctggctcagcgcattgttgcatttagaaaaaaaaaacctaactccaaaagcactgacagaaaagaaagattttctgaaggttttgtagagattgaaggagggagttacatcctataccatgcagtaaaacaatgcagtttcctcatgtgacatctctctgagcctcttcctaaatctctccagccatagacttgggctaacttcctcatgaagtttctcattctgtccctgtcctcaagggcgccctcaga

SEQ ID NO: 217 - DNA, 1458 bp, Homo sapiens
  misc_feature (247)..(247): Y = C/T
cgagctcagggccctggacagaggaggcccaccaggctgagccctgggcaaggggaaggctgaggtcggctaggctgaagacgggcagcacaggctgaggtctaagctaaggaattttacccctccctaaccctccttcccgcctacccaagacatttttgacatcagaaagaaaaatgaatctgcaacttcaatagtcaggtcctgtctctgcaaataatgatgctttcgaagtttcagttgaacygtccctcgcgaaaaagtttctttaaatgtaagagcaggtcctttacaaactgggccacctcgattttggtgtctcggacatgcaagctggaaaactgctgcaggacaaagaggtcagcacatgagtagaacgccagaggccgggacgactcgcacaaaccaggggctttccagggactgtctcattcagtcctcacggaagtccccatgaggtgggtactgttagtacctctactgtacagatgtggaaattgaggcccaggtaggagttaggagcccttgagcccagatcctgtaaatcccgaaggccacgtccctgctgccacaatggccccacccctgggtggacacacaccatggatattcagccagcttcccttcagcgagcccagggttggcaggagggggtgcagggtgggtgtgagagggtgggggatgccttaccccagctgagaccttgtgcgggcagaatccgctcagcatcctctgggtcttctcgatggcactgcagcctgacacgttgatcagggattccagggctgcacagtactgtggggaggggacaccgaggggtcaggccctgcttgggcagctgccttttgtgagtctgcaggaagatggggctgagatgcctggcgcaggtgagtctgggtggtgggcgggaaggggccagattatggcgggagggaggagagcacttgaagcttgcttggaaccccagccatggaagggaggctcagagaagataagcccaaggcctggagcctctgccccatcctccctgcacccaaaggtccttaccatgccagctgtcaggttgatgctccataccatgctgccattgcagagcggagcctgtgggagcaaagtgacagtgagcagagtgctggcaggggttgtgggcctgccctggcagcccaggccaggtctgccccagcacaggccccacaagcatccctggtgtggcacagaggcaggcctggcagcccctcagcattcctgagcttcgttttctgctttgaacagcaggcataggggtgaggtcccactgtttagggtcttggagctgagagaaaaaaattgacaccactagtaagggacaagctgcatgcaaggcttgccatagtcagggcaggaggacaggggcctgcgggaagggccagggtggggacgagtgaagtaggagtggcctgggccactgttgaccaagac

SEQ ID NO: 218 - DNA, 3505 bp, Homo sapiens
  misc_feature (320)..(320): R = A/G
aagcaaagtcgaagcctgttgccttggtctgttgcttggttgtgaaatggagatgaacgtggcattgagaagacaggcaaagaaagcacagctgtggtcagaggctaagacattcaggaaatctgggggaagagacttcgggaattctttgtactcttctcccaactttcccgccagtctgaaattatgtcaaattacaaagttaaagaaaacagggcattgttctcgggtgcaagagagataataaatgtcttcttgcatacagtcccactgttcaagttcctgcccaagatgcccagactttatctgtgactgctccrtcagtcctgggagcaggtccaaaggcaccaagatagtaaaacctctgttcccccatctaggggttcccaagtcttgcctcagtataagctcaatcctcattatatcctaacacgcttacttgtttccaagcctttcggtctttaaaactaatagagtttattttttagaaccattgtagattatggaaaaattgagccgatagtactgagagttcccatacatccctctcccccatgcaaaatttcctcttttatcaacatcttgcattagtgtgtagtgccttccttataatgctgatacattattataaactaaagtccatagcatacattgtttcactgtttctcggggttttgttttgttttgttttgttttgtgtttgtttgcttgtttggaaacaaggtctcactctgttgcccaggctggagcagcctggaactcctggactcaggggatcctcctgcttctgccttctgagtagcttgggctacaagaacatgccaccacactaggcttttttttttttatacttttagagacagtcttgctacattgcccaagctggtctcagactcctaagctgaagttatccttccatctcagcctcctaaagtgctgggattacaagcatgagccactgtgcctaacctctgcagcacagttctgagtcttttttttttctttgagacagagtcttgttctgtcacccaggctggggtacagtggcgtgatctcaactcactgcaacctgtgcctcccaggttcaagcgattctcactcctcagccttccaagtagctgggactacaggtgcacgcctggctaatttttgtatttttagtagagacggagtttccccatactggccaagctggttttgaactcctgacctcaagtgatccaccagcctcggcctcccaaagtgttgggattacaggcatgagccaatgcacccagccaagttctgggtcttaacaatgtataatgccatggatccacacatgtagcaacaaaaagaatagtttcccagcctgggcaacatagcaagacccggtctctaccaaaaaacacaaacaaacaacaacaacaaaaaacaggccaggcatggtggtgcactgtagtcccagctactcagaggctgaggcaggaggatcccttgagcccaggagttcgaggctgcagtgaactatgatcatgccactgcactccagcctgggcaacagaatgagaccctgtctctaaaaaaaaaaagaaaaaaataaagaatagttttacttccctaaaaatccccaattctctacctattcttcctggattctggaaaccactgatttttttactgtctccatagttttgcctttttcagaatgtcacgtaattgaaatcagaaagtatgtagtctcttaatactgacttcttttacttagcaatatgcttttcaggttcctcaatgtcttttccaggcttcacacctcatttcttttgtggctgaatagtgccctattgtatggatgtaccacagtttatccattctacctattgaaagacatctttgttgcttccaatttttggcaattatgaataaagctgctatcaacactcatgtgcaagtttttgggtggacataagcttgcaacacaattgagtaaataccaaggagcacaattgctggatcatatggtaaaagtaagaaagtttggcaataaactgccagtgtcttcgaagctagctgtaacattttgcctttctatcaacaagtgagagtttccattgctctgtattcttgtcagcttttgatattgtcagtttgaggattttagccactctagtaagtgtatagtggtatctcatcattgtttgcaatttcctagtgacttaagatgcatatgtcaatgtttgcaaattaggaaatttgcaatttcctaatgacatatgatgttgaacatattttcatatgctttttgccatctgtatatcttatttgttgtctgttgatatgttgtgcccattttttagttgggttacttgttttcttattgtcgagttttaaaattctttgtgtattttggatacaggtcctttatcagacatgtgttttgcaaagattttcaaatttaatatagttttcaattttcataaactccaaaccaccaattttttttctcattcctggattatacttttagtgtcatatccaaaaactcattgccaaacctaaggacactgagatccaagattttatcctatgatatcttctagaaattttataattttgtattttacatttaggtccacgatttatgttgagttattttttgtgaaaggtgtaaggtctgtgtctaaatttattattattattttgcatgtagacatccagttgtttcaggaacatttgttgaaaagactatccttttcccactggattgcctttgcctctttgtcacagaccagttgactgtatttgtgtcagtatattttggggatctgtattctgttccattattctttttgtctcttctttcacctgcaccatactgtcttgattactgtagctttattttatagttttaaagtcaggtaatgtcagtccttcaacttggttgttgttcttcagtattgtgttggctattccaggctttttgcctttctgtttgaactttagaatcagtttgccaatactcacaaaataacttgctgggattctgatagggattgtgctgaatccgtaagatcaagttgggaaaaattctccatgaacatggactatctctccatttattgagatctttggtttcattcatcagaattttgtagttttcctcataaagatccagtatatgtttattagatttatacttaagtatttatttttctttcttttttggtgctaatataaatggcattgtgtttttaattttaaatgccacttgtttattactggtatgtgggaaagcagttgacctttgtatgttaactttttatcctgcaaccttgctacacacacttattagttccaagagggttttttatttaattctttaggattttctatgtagacaataatgtcatctgcaaacaaagaaagtttggtttcttccttccaaatctgtgtaacttttctttttttctgttgaagaaacccaaatggaagtttctgtgtgtaggggaatgcttctgggataagg

SEQ ID NO: 219 - DNA, 601 bp, Homo sapiens
  misc_feature (301)..(301): S = C/G
atggagacaaattcctctctccccacgaacacctctggagggacacctgctgtatctgctggctatctcttcctggatatcatcacttatctggtatttgcagtcacctttgtcctcggggtcctgggcaacgggcttgtgatctgggtggctggattccggatgacacacacagtcaccaccatcagttacctgaacctggccgtggctgacttctgtttcacctccactttgccattcttcatggtcaggaaggccatgggaggacattggcctttcggctggttcctgtgcaaattcstctttaccatagtggacatcaacttgttcggaagtgtcttcctgatcgccctcattgctctggaccgctgtgtttgcgtcctgcatccagtctggacccagaaccaccgcaccgtgagcctggccaagaaggtgatcattgggccctgggtgatggctctgctcctcacattgccagttatcattcgtgtgactacagtacctggtaaaacggggacagtagcctgcacttttaacttttcgccctggaccaacgaccctaaagagaggataaatgtggccgttgccatgttgacggtga

SEQ ID NO: 220 - DNA, 601 bp, Homo sapiens
  misc_feature (301)..(301): Y = C/T
  misc_feature (378)..(378): n is a, c, g, or t
tgataagattaatctaaagagcaaattatggtgtaatttcctatgctgaaactttgtagttaattttttaaaaaggtttcattttcctattggtctgatttcacaggaacattttacctgtttgtgaggcattttttctcctggaagagaggtgctgattggccccaagtgactgacaatctggtgtaacgaaaatttccaatgtaaactcattttccctcggtttcagcaattttaaatctatatatagagatatctttgtcagcattgcatcgttagcttctcctgataaactaattgyctcacattgtcactgcaaatcgacacctattaatgggtctcacctcccaactgcttccccctctgttcttcctgctngcatgtgccggcaactttgtccacggacacaagtgcgatatcaccttacaggagatcatcaaaactttgaacagcctcacagagcagaaggtgagtacctatctggcaccatctctccagatgttctggtgatgctctcagtatttctaggcatgaaaacgttaacagctgctagagaagttggaactggtggttggtggcagtccagggcacacagcgaggc

SEQ ID NO: 221 - DNA, 601 bp, Homo sapiens
  misc_feature (301)..(301): R = A/G
gtggtgctgggtgcataccaagcactccgtcagtgtttcctgttattcgatgattaggaggcagcttaaactagagggagttgagctgaatcaggatgtttgtcccaggtagctgggaatctgcctagcccagtgcccagtttatttaggtgctctctcagtgttccctgattgttttttcctttgtcatcttatctacaggatgtgactgggaagctctggtttcagtgtcatgtgtctattctttatttccaggcaaaggaaaccaacaataagaagaaagaatttgaggaaactgcgragaaagtgcgccgtgccatcgagcagctggctgccatggattgaggcctctggccggagctgcctggtcccagagtggctgcaccacttccagggtttattccctggtgccaccagccttcctgtgggccccttagcaatgtcttaggaaaggagatcaacattttcaaattagatgtttcaactgtgctcttgttttgtcttgaaagtggcaccagaggtgcttctgcctgtgcagcgggtgctgctggtaacagtggctgcttctctctctctctctcttttttgggggctcattttt

SEQ ID NO: 222 - DNA, 801 bp, Homo sapiens
  misc_feature (401)..(401): Y = C/T
tccaggtgcctgtatcacctgcccttctgctgacactcctgcctgctgttcctgactacagccatcatgcctcggggtcagaagagtacgctccatgcacgtgagaaacgccagcagacccggggtcagacccaggatcaccagggtgctcagatcactgcaactaacaagaaaaaagtatccttttcatcccctcttattttgggggctactatccagaaaaagtctgctggtaggtcacgtagtgctctcaagaagcctcagagagcactatccaccactacatctgtagatgtttcttacaaaaagtcatacaagggagccaacagcaaaattgagaaaaagcaaagcttctctcagggtctatcctccactgtgcagtctcgcacagaccctctaaycatgaagacaaatatgttggtgcagttcctgatggaaatgtacaagatgaaaaagcccattatgaaagcagatatgctaaaaattgtccaaaaaagccataagaattgcttccctgagatccttaaaaaagcttctttcaacatggaggtggtatttggtgttgatttaaagaaagttgattctaccaaggactcctatgtccttgtcagcaaaatggatctccccaacaatgggacagtgactcgtgggaggggatttcccaagacaggtctcctgctgaatctcctgggcgtgatcttcatgaagggcaactgtgccactgaggagaagatctgggaattcctgaataagatgagaatatatgatgggaagaaacacttcatatttggggagcccaga

SEQ ID NO: 223 - DNA, 801 bp, Homo sapiens
  misc_feature (401)..(401): S = C/G
gccctccccaataactgcatttctctatttttttctccttctttctctccctcatgcccctcccaacccctcatctccctgtcttcctcagtggtactgactgtcctcacccacacccctgcccctcgagtgagactgggacaagatgctctgctggacttgagctttgcctacatgccccccacctccgaggccgcctcatctctggctccgggtccccctccctttgggctagagtggcgacgccagcacctgggtaagggacatctgctcctggctgcaactcctgggctgaatggccagatgccagcagcccaagaaggggccgtggcatttgctgcttgggatgatgatgagccatggggcccatggaccggaaatgggaccttctggctgcctasagttcaaccctttcaggagggcacctatctggccaccatacacctgccatacctgcaaggacaggtcaccctggagcttgctgtgtacagtgagttgggggacagaggtctccaggggtagagggtgggcactggattgtggggaccgtaatagggggagggatgatggataagagggtgcctgggcaagtaagtagagatagaaagaggttcctgggagttagaggggtaatgggaggctagaagtttcctggaaatttgaggggctttgacatgggtatttctgtgacgcaccaatggagagacagtgggttccctatttcaggagaagaaacctaaccttctttagttctgaggaagccagcaggcaaactgagggtctcttagggaggacagtatg

SEQ ID NO: 224 - DNA, 601 bp, Homo sapiens
  misc_feature (301)..(301): N = A/C/G/T
tctttactttgttatagtcagatgaatccttgtctatttttaaggacacctccacggatcctgtcagagtgctcagctggctccgcagagacctggagaagagtacagcagagttccaagatgttcggttcaaacccggagaatcatttggtggggaaacgtccaactcaggagacccacacaaaggtttctctgtagactattacaacaccaccaccaagggcactccagaaagattgcattttgagatgactcacaaagagattccttgccagggccccagggcccaacttggcaacgngagttcagtagatgaagtttccttctatgctaaccgcctcacgaatctagtcatagccatggcccgcaaagagatcaatgagaagatcgatggctctgaaaacaaatgtgtctatcagtcattgtacatggggaatgaacccacacccaccaaaagcctcagtaagatagcatcagagcttgtgaatgagaccgtctctgcatgttccaggaatgctgccccagacaaggctcctggctctggagacagagtctcgggatcatcacaaagtcccccaaatttgaaatacaagtccacttt

SEQ ID NO: 225 - DNA, 801 bp, Homo sapiens
  misc_feature (401)..(401): R = A/G
gaaaatcatcatgatggagacagcaatgacgccatggtcccaatcacagaacatatgcagtcccaccagccccccttttctagctttacagcccacagccagaaggagctgccatttatcatgcacttaagattagccaggcactgttttggggttcacccagccctcacacaaccccaggaggcaaaggaggctgagccccggagaagttaatcggcaggaagccgcagctgccagggcgcaggcaggatttgaagtcaagtgtgttgaactctggagtctgagtttgcaactaccggcattgccacttacccctagggagctgcccacctttgtggggtggaggcctggtgctgtcttctgtcccccacccctctgacccatctttctttctgcagccragaggccccagcaacatgcagctacaattccagagacccctggccctcagttcagccaacaacggggtaagtttttgcatgtcccttcagttcccgggacacaggatcccactccccaggaaccccaggccctccttgagggtacaagatctcaccagtgttcaggggccctgtcccacccaccaggcagctcccatacagtgttcagagccaagacccagccctcacagtgggagaatctgaatggctgagcagtgatttctccagtcagacaatagctgaccctcaccatgcacccgccacatgccaggcccagcgcagagcactctgtgcacatcccccaccctcagggcacctctgcggtgcgtcatgatgaccccgttatcatgacacccatttt

SEQ ID NO: 226 - DNA, 601 bp, Homo sapiens
  misc_feature (301)..(301): R = A/G
gggtcccttgcagaagactatggcttgagagtttttcctagactagaggggcagggacccttaggagtccctagggaagataggggttggacagttacctgggaagatgggcaagatcctgggggtacctggggataaagatgggattcaagtactctagggagatggaccaagattgggagtgagggctgaaccagaagaggctactctggcaggtggagtcagtctgagcctcctcatgtaccagcctctttctcctccctgccctccgcctgcagagggaccagcaagaagtgatccrgaagttccaagatggaaccctgaaccttctggtggccacgagtgtggcggaggaggggctggacatcccacattgcaatgtggtggtgcgttatgggctcttgaccaatgaaatctccatggtccaggtactcacatcctcctccactcagccgcccttataggatcctgtgtggggccccagcccaactcaggacaccccttgtctctcttcccaggccaggggccgtgcccgggccgatcagagtgtatacgcgtttgtagcaactgaaggtagccgggagctgaagcgggagctgat

SEQ ID NO: 227 - DNA, 672 bp, Homo sapiens
  misc_feature (472)..(472): R = A/G
cactgttgcccccgactactcatactgtttttctccatagctgtttttttttttttccccgagacggagtctcactctgtcacccaggctggagtgcatggcacaatctccacctcctgggctcaagcaattctcttgcctcagcctcccgagtagctgggattacaggcatgcgccaccatgcccggctaattttgtattttcagtagagatggggtttcaccatgttgcccaggctggtctcgaactcctgacctcgtgatccacccgccttggcctcccaaaatgctgggattacaggcatgagttactgcatcatcacagcaatagagcttcttttaagctccagggagggttaaggaaagtctcttccaggtacaaatgatcttagttctttgggaaccttttgtcccccaaggaacgttctcttaggccccagccatgcctggtgtctcctcccaccccagatccrggatctgcagcaggcagccttgaccaagcgggcggcccaggcagcccagcgggagaaccagcggcagcagttcccagtggagcacgtgcagctactctgcatcaactgcatggtggctgtgggccatggcagcgacctgcggaaggtggagggcacccaccatgtcaatgtgaaccccaacttctcgtgagacctgtgga

SEQ ID NO: 228 - DNA, 997 bp, Homo sapiens
  misc_feature (498)..(498): M = A/C
tcccctaaagcattgaggataaagcgaagagcattccagatcttgttgcagaaatgtcggcagctctggacctcagagactgacaggtgcaagtcgcccgctggaagggaagaatcgaggtagtctgcatgtaggtggcagcagcaccagaagtcctgcccctgccctgcccctgcacaggtgcccgctgccctctgctcaccccgacacccctcgcccaggcttaccctgaactccatgggagcagagtgtgaatctcagggcatctgtcccacactcagggatcccgtgaggaaagtcctttttctgcaaccagaggaagaagaagggtggcagatgcctttgtggctgcagggccaggacctgggttgcagaggaagccagaggtggtgagctagagctggtggggggcaggcagcgatgactcacctgtgctgcagccacaatggccagctctgcagggtccaaatttccgcttctcagcttttcctgcagcamctggggatggaagggggcaattcacgacccaggtcgaaggccctgcctctataagggtcacacctgctggcctcactcctccctcagcctgccttcctctctcctgcaaaccctgcaaaccttgtccctctagtgggtgcttcgtcctcacctgcatctccaccccactgatgatgtctcttgggtccagcacattccccagggacttgctcatcttccggccctgcctgtcccgaaccatgggatgaagaagcacctgggggcagggaggggtcaacagaggggggtttccttggaggtgccttgggatctctggcctccatacttttgggggtagggtaggaagtgaattaggaaaaaggaatcagcaacgtggaaaggaccacattaggggttagaagggaggacaaggtttggggaacactggagtcacagaaagcggcagggcactgaagggctcttaccttgctgaagggcagctgccctgtgagctgggtcc

SEQ ID NO: 229 - DNA, 639 bp, Homo sapiens
  misc_feature (201)..(201): M = A/C
ctttgagagtcctaaatgtggctccattggtcctttggaaaagctgcagggaggactcagggcagtggggtgctgagtgtgttggagacagttgcagatccttgacagttctcttccctgacagcgctgtttccagtcacactgcagtgtgccaacatcagcatcctggagaacaaactctgtcactgggcataccctggmcacatctcggacagcatgctctgtgcgggcctgtgggaggggggccgaggttcctgccaggtgagaccttactctggggaaaatgaggctgtcctgccaagttttctaggatttaggggagcagaggggtcggcccccagccttcctgggtcaaaatgagaaggagactgggatacctggttcctgggagaggacgggaccagggcctggactccttagtgtaaaagagaaaaggtctggaggtccagacttctggatctacaggaggagtgggctgggcgtccagagtctgagtcctcggggaggaggaggttaggtcctgcggggaggtgggccctctgagcttttactcctgggtctgaggaagaagaggctggagatggaggactctcggatgttggaggaggaaggggctggggcctttctgggagggaggaa

SEQ ID NO: 230 - DNA, 601 bp, Homo sapiens
  misc_feature (301)..(301): R = A/G
gacatgctgctgctgctgctgcccctgctctgggggagggagagggcggaaggacagacaagtaaactgctgacgatgcagagttccgtgacggtgcaggaaggcctgtgtgtccatgtgccctgctccttctcctacccctcgcatggctggatttaccctggcccagtagttcatggctactggttccgggaaggggccaatacagaccaggatgctccagtggccacaaacaacccagctcgggcagtgtgggaggagactcgggaccgattccacctccttggggacccacataccragaattgcaccctgagcatcagagatgccagaagaagtgatgcggggagatacttctttcgtatggagaaaggaagtataaaatggaattataaacatcaccggctctctgtgaatgtgacaggtaaggcacaggctccaggaaaggccacagggaaaggtcatgggggcggcagggaaaggctgggatggagcccctgccccaggagagggcttagggtgaagcgagttggctcagggcaggagctggaccagagcctgagctccccccagggctgcaccatggatcctctgacctgat

SEQ ID NO: 231 - DNA, 681 bp, Homo sapiens
  misc_feature (425)..(425): N = A/C/G/T
ttgataggaattgcttgtattttttttccagtttataatttatatttttttcctatatcgaaataaaaagtgtgtgtgcgtgtgtgtgtgtgtaaaagaaagagagagaaagagaaatttacttatcctttcctttgtggaccstgagttttatgtcaaatttgaaaggatttttccagttccgaaattatttttaaaattatgttgtgtttcctattattttatggttttatttttcacatttgtaatgtatttttaacttatgtttttaatgcagcaagattaccttatgctggctactttggatgagaatgaggaagtgatagatggaggcaaaaaaggagcaatcgatgaccttcagcaaggtgaattggaagcatttattcaaaatcttaatttggcgaagtatacaaaagcttccttanttgaagaagatgaaccagctgaaaaagaaaattccagcaaaaaagaagtaaaaatacctaaaataaataataaaaatacagcagaaagtcaaaggacatcagttaataaggtgaaaaataagaataggccagaaccacattctgatgagaatggcagtaccacaccgaaagtaaagaaagataaacagaacatctttgaattttttgagagacagactttgttacttaggcctggaggcaaatggtatgatctgga

SEQ ID NO: 232 - DNA, 601 bp, Homo sapiens
  misc_feature (301)..(301): R = A/G
actcatggaagagatgaacatgataaaagagatgcaagaaacaagcttattaaaaatcagcttggattaagccttcagtcacatctgcctgaactgcagctttttcaatatgaagggaaaatttatgaatgtaatcaggttgagaagtctttcaacaataattcctcagtttcaccacctcaacaaatgccttataatgtcaaaacccacatttctaagaaatatctcaaagattttatctcttctttattactcacacaggggcaaaaagcaaataattggggaagcccttacaaatctratggatgtggcatggtctttcctcaaaattcacaccttgcaagtcatcagagaagtcatactaaagagaaaccttacaaatgttatgagtgtggcaaagcctttagaacacgttcaaacctaactacccatcaggtgatccatactggcgaaaaacgttacaaatgtaatgagtgtggtaaggtctttagtcgaaattcacaactctcacaacatcagaaaattcacactggagagaaaccttataaatgtaacgaatgtggcaaggtcttcactcagaattcacaccttgtaagacatc

SEQ ID NO: 233 - DNA, 601 bp, Homo sapiens
  misc_feature (301)..(301): M = A/C
tcaaggagcagttggctgtgagagagggagggctggtcagggtgactcactatggcagctcccacatcaccccgtgctgcagctgagaggaggggagtctgcacactgatgttgtccctgccttggactctcctacagagcccgcagcttcatctcccagctcaaacaacacagcggccacaacagcagctattgtcccgggctcccagctgatgccttcaaaatcaccttccacaggaaccacagagataagcagtcatgagtcctcccacggcaccccctctcagacaacagccaagamctgggaactcacagcatccgcctcccaccagccgccaggttagcactcgctttgccccaggagaggtcagttccccattgctgcttctgagatcggggctgagatccggcacaaggcagctttataccatcaatccaaagtcaggattcactgggcagcctgctggccccggccaccagccacggcgtcctggcctgacctctttctccgtggctttctctgtggctggggcagctgcaaaagcaagcccacacccccccaagatgtgacagggccagccttatcacccgcatggcagag

SEQ ID NO: 234 - DNA, 601 bp, Homo sapiens
  misc_feature (301)..(301): S = C/G
aaacagcttgtaaaatataattttctacaaagaatacaaagtgattatttttattggcgattattgtgctttatttggaagacttattcttccttctttgtttttctcctaggaccactgaggttcctttcacagacagaatctgtcacagccttcatgggagacacagtgctactcaagtgtgaagtcattggggagcccatgccaacaatccactggcagaagaaccaacaagacctgactccaatcccaggtgactcccgagtggtggtcttgccctctggagcattgcagatcagcsgactccaaccgggggacattggaatttaccgatgctcagctcgaaatccagccagctcaagaacaggaaatgaagcagaagtcagaattttatcaggtattgcaatgctctttgttgccttcagaatgatattctctggaataagttgaaaaacaatttttttctttaacagatatttgtaattgttataagttctgtattgttcattgcgttttgtttattatttctttcttccttgccgaagcattcaatcaggttgtaccaaaagctgttcttttttttttttttcatgtcttgttg

SEQ ID NO: 235 - DNA, 801 bp, Homo sapiens
  misc_feature (401)..(401): Y = C/T
tctgcctgggcctcggtccctcctgcacctgctgcctggatccccggcctgcctgggcctgggccttggtgggtttggttttggtttccttctctgtctctgactctccatctgtcagtctcattgtctctgtcacacattctctgtttctgccatggttcctctctgttcccttcctgtctctctctgtctccctctgctcaccttggggtttctctgactgcatcttgtccccttctctgtcgatctctctctcgggggtcggggggtgctgtctcccagggcgggaggtctgtcttccgccgcgtgccccgccccgctcactgtctctctctctctctctctttctctgcaggttctccccatgacaccacctgaacgtctcttcctcccaagggtgygtggcaccaccctacacctcctccttctggggctgctgctggttctgctgcctggggcccaggtgaggcagcaggagaatgggggctgctggggtggctcagccaaaccttgagccctagagcccccctcaactctgttctcccctaggggctccctggtgttggcctcacaccttcagctgcccagactgcccgtcagcaccccaagatgcatcttgcccacagcaacctcaaacctgctgctcacctcattggtaaacatccacctgacctcccagacatgtccccaccagctctcctcctacccctgcctcaggaacccaagcatccacccctctcccccaacttcccccacgctaaaaaaaacagagggagcccactcctatgcctccccctgcca

SEQ ID NO: 236 - DNA, 801 bp, Homo sapiens
  misc_feature (401)..(401): R = A/G
tctaaggacttatttatcccttagacaatagatggataacttggtcgatagcatctagatttaaaaaggccacgcaaagggcaatggtacctctcaggggctgtgcagacggtgggagagtgctcagaggcgtcagaaaggcccaggcccatagcagcccagtcttgagcctagtagacctgccagccccaagtcggacaggatggagcccaactcatgtggggaggatggttccggctgagtggctgtgccaggtcagaccccacctggagacggtgtcttttctgtcaggacatcagttatgtgacatcttccccatcctcatgttttttagcatctgccacctccactgcccagcaaaactccgcctcctccccctccaaagacaactcgcaagcagrcatcggtggactccgggatcgtgcagtgacgtcgcaagcctctctggaaagagtgtgctgcccctccccatctccatgccctctccttctgtgtcccctgagtctgctgtttacctcattgggcctgtgatgttaacatttcgtgcgactgctttttcttcaaaggagttcagttctcaccatggagtgagtggcctttagcgtcatggagcaaggtgggtctgggaggtagatatgggtccgggatgtgctatcgtagttatcagagttgggggcctctgagtgtgtctggctctgagagagtctgagtcttgcccaaacattctttctttttgtgccaaatgacttgcatttgcaaagagctcaattgctctgagctcagccaagtaggagaggctag

SEQ ID NO: 237 - DNA, 601 bp, Homo sapiens
  misc_feature (301)..(301): S = C/G
tacttatcagtgccaagcgtccagctcacgaggcaaatacaccctggtcgtggtgatggacattgagggtgagctaatacggggctgcgggtctggaccggtaagccggggggcgggggggttggagacagaagggacgcatattgacttagcgctttctctgcacagctgggagctcccactttgtccccgtcttcgtggcggtgttactgaccctgggcgtggtgactatcgtactggccttaatgtacgtcttcagggagcaccaacggagcggcagttaccatgttagggaggagascacctatctgcccctcacgtctatgcagccgacagaagcaatgggggaagaaccgtccagagctgagtgacgctgggatccgggatcaaagttggcgggggcttggctgtgccctcagattccgcaccaataaagccttcaaactccctaatctgtggtttgattccacccgcgctgcaagtctctcccacccaggtgcacatccactgagtagcgtcgctgcgacggaagggggcggggcctgtggcgcgcagacgcagcttgaactcttgagaggtgggctggggcttagccaacggg

SEQ ID NO: 238 - DNA, 601 bp, Homo sapiens
  misc_feature (301)..(301): K = G/T
gtgtcattcattaaaaagaagaataaaaagaactctttttttcttaaagctgtcatcatcttgtgaaatatcagtttgcccttgactaggaaattacatcaaattaaaccattcagtcccctagaatagcagtagggctggtttattctgaaaacctttgctgggtcttacatgcagataacttgactttccttctcttctcctttctgtcctcaggtgacggcaattgcctcatgcatgccacttctcagtacatgtggggcgttcaggacacagacttggtactgaggaaggcgctgtkcagcacgctcaaggaaacagacacacgcaactttaaattccgctggcaactggagtctctcaaatctcaggaatttgttgaaacggggctttgctatgatactcgggtaggtttttccccctaattatctactaacagagctccatggtgggcatagggtacccctgggcgagtccctgccctctggtagcatctgatggactaggtcacatgaatttggctaagcgaagcatactcaatggaaaacaccagaaacctccagtgggactcacccaaggcttttgccctgcttttggttag

SEQ ID NO: 239 - DNA, 601 bp, Homo sapiens
  misc_feature (301)..(301): R = A/G
ctggagaaactggtgtggataggaaggagctgagtatcagcttcatgtgggggtttggggaggtggcaaggggtgaggggagaggagaaagcagaaaacagcaaaattgtgtcattggcctgcatagcacagatgtggtgcctgagaatgagggtcaatgaataaacaagaaaccagcttttccactcagctaagaggtatttattcagttgctggcacctctcccagtgtaaatctggacttggctccagagaaggtgtttcattacagcgggggcttagtttgcttcctgtagttagtrgcgtttcatggttttctttatccagtgtacaaagcttgagactttggtgcaggctcgtggaggcatgccattgtttcgtccataggagacaatgccctgggccaccttgttacacacaagagggcctccagagtccccctgtgaatagagagtggaaggactgagctgatgctcctccgggtcctgccctctcttccatctcaagcccccttttagaaaaggccaacttgcacagcctacatgtgggagaccagagggcagggcaggccgctggtggcccccagctgccaagctctggcc

SEQ ID NO: 240 - DNA, 801 bp, Homo sapiens
  misc_feature (401)..(401): Y = C/T
cttcccaagtcccagaggcatgagaaagagaatggagggcagagagccgaaggggcccgaagcatcatggccatgtccacccttaggaggctcggatgggtgcccatccaaagactcgagtgcctcctgagtcctcttccagtgctcctcctagactcaaggatacaactgcaggggcccagtagagcccaggccacaggtgtgtctaattctgagccagaggacttcacagttcagtccccacccctcaaattagttttcttctctgggcgcatgggctctgttcccagtctggtccaactcccccatccagctctcctgccggcaggcacaagtgaggtctcccactcactaaccacgctctttctcctccctggcagcctctgcctccacacagaccycctggactccccgcgacctggtctcttcacagacccagacccagagctgtgtgcctcccactgcaggagccagacaagcccctgagtctccatctaccatccctgtcccttcacagtgagtttcggggtgcccgtagccacacaggcctgggcgggggctggcagatggagacttgcctccccagcccgtcctctccccttcctgtccctctgccttccaggccacagaactccacgctccgccctggccctgcagcccccattgccctggtgcctgtgttctgtggactcctcgtagccaagagcctggtgctgtcagccctgctcgtctggtggtgagtgtggtgtgggttgaactcggggaaaatggaacagggaacagcttctgcccaggatagag

SEQ ID NO: 241 - DNA, 660 bp, Homo sapiens
  misc_feature (486)..(486): R = A/G
cccttattactgctgctcaaaagagtaggaacctaaggcaaagagtggtaagataagttactcgagtttagtctataartagcgacagatgtactaaacaaggaaaattccacctttctccttcatggggctaggacgacaatcagcccacattctcccactctgcaactgctgggtgatagtgggccttgctgggacctcatgccactatgctcccattctaaggtgacgttccctcctcatgtgggctttccttgaggcaggtgtgtgagtcggtggctcactcataacttgctgagtagctaaagagctgatttagtgtaggaatgttgtgtaaatttcaagccttgtcctttcgtaaatagtcattgcaaagacaaagaaggtgtatttaacaaacttgaattgtttccaggtcacccatttgctgtagcagtgtttgaggattatgtgtggttctcagattgggctatgccatcagtaatragagtaaacaagaggactggcaaagatagagtacgtctccaaggcagcatgctgaagccctcatcactggttgtggttcatccattggcaaaaccaggtacatactggagatgttacacagtctttccttggctggaatctgcaactgttttaattgtttgatgtcatgcagtt

SEQ ID NO: 242 - DNA, 801 bp, Homo sapiens
  misc_feature (401)..(401): Y = C/T
tcagtccctccctttccccataaaccccactcacaagtcagtctggggcattgcctataaggctcctgtccttcctttaggactcagtgcagtgttctgcattggtgcccccacaacatgtccatcaaacaccttttcattctcagaccattaccttctacagagaatgtctgctcgtattattcattctttcttctttgtcccctaaacttacaccctccttgcttatcacctcattccccaaccagtttcaagaacagatgaagggttaatactggtaaccgtcagtattctctgcccttcctgtagtcccggaaatagaaattgtgagtccggttcctcatccaggaaaggggcagagcatggaagagccagggctgggcgcctactccaagatcacygtggggaagggatctggcccatgccaagattctgctgctccatcaggtagaccgggtaggaattggggccaccctcatcctctgcatcattgtactgggtgttctgggttagtgtgcggcgtgtccgcatcatataggagacctgtgattgggatgagaaaggaggaatgagaaccatctgcgatttgttttccacaacactcacctcaggtcttgattctattctcaagattccatccaaaccttgatgtttattccagctccaggtccaatacaatgagtcccagctccatctccagttccccactctaccatattctccttgtctttacacctcctattctcataccccagactctccaccccccacactttctctttcacaccctttcattctcag

SEQ ID NO: 243 - DNA, 401 bp, Homo sapiens
  misc_feature (201)..(201): Y = C/T
aggcaggtgagtctgtccccagctgtcctaggtccctcctcctctctggggacaagggaccacccctgggcagctgggggtgaagacagcagttctgggctgactgatggggatgaggggggtcctggggctgagagctgggatctgagggttgaggacatcttgggacctaacctgtaatttccttccagaaaacctacycaaacccatcctgtgggccgagccaggtcccgtgatcacctggcataaccccgtgaccatctggtgtcagggcaccctggaggcccaggggtaccgtctggataaagagggaaactcaatgtcgaggcacatattaaaaacactggagtctgaaaacaaggtcaaactctccatcccatccatgatgtgggaacatgcag

SEQ ID NO: 244 - DNA, 601 bp, Homo sapiens
  misc_feature (301)..(301): N = A/C/G/T
tactgctgcaaaagaaaacaagcacgaaggaaaccaagatgatttcttcgggctgatacaacctgttctgacctgcaaaaatcctaccttcccccacctccccaccgtaatagtcatagtataagggttgtacagacgcctcaggagacctgcctgattcctttacatccttctccctaacatctagactatctctagagctgtttcctagtcgtgaatgcgtgatggtccttctttgtccctgcaagtatgatccaacatggcccagttcagaatcagaatatgtcttctgtgtcatggnggcatttggtccatggtgggagaaagaaatcaacttttcccagtggtggagtgaggacaggggagggccggccctctcagccttggatgtgatccatttgctgtagtcttccaccttggtgtacagaaacaggccagggcacgtctcaccaccgaagttcaggactcctctcagaacccacagatcgaactgctgtagctggcacatcattgggcttcctgggtccccctgtgataaaagacagaaggcttcaagtcttagaaaaactagtttttgttgtaaatctatccttgtgcaata

SEQ ID NO: 245 - DNA, 601 bp, Homo sapiens
  misc_feature (301)..(301): Y = C/T
ccctcatgctagcaatcctttctcagtcagctctgccattacagaggatggttgtaacaaattttgtcctctgaaactaagcaaaatatatcaatttctcacagctgacagagccaaaaggtggaaaggcttgatataagtaaaacaatggaatgcttagctgcaggcctagaaaggaccctttaattgccaggctctgtcaccatatcaagcgtggtagggttcggggctgaagcatacttacgaagacacacaaggcagtagctggtaccctcacttctttaccagaaccaggatgagyatccacattgtcctgggggactgggaaggaagagacagagcgtctcctaagaaataacataaagacaaatattagacaggattgcagaggtttactgctcatcaaattgttagaaaggactccaagacgaccttgcttaagcagactgcctctgttgatagcctgtccttctagattcttcaaactacagaacaattcacaaaaaaatcaaaagcaccctcactcaaatgagaaagagagccagcacatgccttactctcctgcacactaacctgtggactccaaaacccaacaatgaaa

SEQ ID NO: 246 - DNA, 801 bp, Homo sapiens
  misc_feature (401)..(401): R = A/G
ggggcagagcctctggagatgtctgagtcacaaagggacccagaaccctggagtgatgaagtccaggcagtgccacggtctccctggcactccactcgggtggagggtggatggaagggtgacagggtgttctaagagttgaggccagcggagaggagggtccaaaccaaggcacgacagggaggggaggcaggggatagactgggctccacagggcagaagcccatttgtgaaatcaaaagcagcccactgagggatgcaaggcccatcacccttccctcccctaagggcactgtggactgggagggggccagagaccctccaggcagagctcctggcccccaacccagcagcccggctctcccttccagctctggggcgctgctttccatggaccaacrttactccaccggcgctcccagggatcaccaatgacaccaccatacagcaggggatcaggtaggcacctccctcccccacatcctggccacaccccttccacccacagccccatctgactctgtctccccaacagcggtcttattgacagcctcaatgcccgagacatcagtgttaagatctttgaagattttgcccagtcctggtattggattcttgtgtgagtcaccagattcccctcctcttgtgtccttgccttcttcctccctgatcctctaccccctcgcccaatgtctgaaacacaggctttggacagaggaggaggagccagagctccgaatggattccaagaccaacaggatttataagggaaagaggcctaatctggggacattgggtggt

SEQ ID NO: 247 - DNA, 601 bp, Homo sapiens
  misc_feature (301)..(301): N = A/C/G/T
atcataagagcacataaaaaaatttcaaacttcatacatccactgaaaatagaggctaggtttttattaaaattctactttctttgtgttagaagatacacctcttgtctcccaggccagtgctctttctggagtgcccaaagaccccttctttcttttatgttctgaatcagtgccatcagctttctctagtcactgctaactactgaacaattcatgggctgtgatcagaagcacttacctgcatagcaggtcaggaataagacaagcagtcccaggacaactgtcaggcgaagtactnagacagccattctggtagcacggggtattcgtgcagataaattgttcagatacatgtgaaacaatgctccatttatagggcatagataggtgacatcatctgctttggaatttagattgttgcacaagatgtctgcacagcttgcttttggatctgtactaatgagacataccctatcattcaaaccaaacattttacatatagggaaagaaaaaccctcttgatttttaaaatttgtatctataaagggttctggagtgaatctcttgaggctagtttcaaggccagcattgataatta

SEQ ID NO: 248 - DNA, 801 bp, Homo sapiens
  misc_feature (401)..(401): S = C/G
cacagctggccccacaggtcccccctcagctggccccacaggtccccccactgctggcccttctacggccactactgtgcctttgagtccggtggacgatgcctgcaacgtgaacatcttcgacgccatcgcggagattgggaaccagctgtatttgttcaaggatgggtgaggaggcggggttgtgtggatgcgggagggggctttgcggaggggctgcccgtcccttcccgcccactggccctgtgtccaaggcttagagcccgtcctttccctcctcgctttctcaggaagtactggcgattctctgagggcagggggagccggccgcagggccccttccttatcgccgacaagtggcccgcgctgccccgcaagctggactcggtctttgaggagcsgctctccaagaagcttttcttcttctctggttagttacctactttccctcccccgcccggtcaatccccatcagtcaaggaggctcaagagaccatcgataacccacgaaacgtcttgtgcgttttagaaaaatacgccccctggcggacgcagtttagcaaacgtaggggcggctgagtttctgccccctcctctccacgccctcgcgtcgctctacccagcgcctctgcccctgggttgcagggactgcgggcacgcgggctaggaaaggcctcgccggaatctccctcctcgcgttctaggagtacgtgctccctctgcgcccccaaaccgacgtgaccctcctcccctgcagggcgccaggtgtgggtgtacacaggcgcgtcggtgctgggcccg

SEQ ID NO: 249 - DNA, 701 bp, Homo sapiens
  misc_feature (501)..(501): S = C/G
cacagcagcctccacaatgccaagcaaattcccagtcctcttctggcttcatccctctgtagcatagatgtggtcatcactcagtttttcctttactggatctctgggacactgctctttcctggttctcctcctgctcattgatcgcttcatcttcccaacttttcagtgttagactgctgctgggctcagtcattgaacctcttctctttctgtatcactccactggtgatcttacagctttctatcctatctgtatgctcttaactcccagaagtggcaggcacatattaagtgctcagaattatttgttgaatgaaggttttggcattgtattaataaagttccatagtaattgttttgatttttttgcagctcagattggtcctccagaagtacatttagaagctgaagataaggcaatagtgatacacatctctcctggaacaaaagatagtgttatgtgggctttggatggtttaagctttacatatagcttasttatctggaaaaactcttcaggtgtagaagtaagcattatttttacctctgtttaatcgatgtgagagaaaaattaggcgaattaatcctaaaatttgactttatacttttttaaagaaccaacttatatttgtgttataggaaaggattgaaaatatttattccagacataaaatttataaactctcaccagagactac

SEQ ID NO: 250 - DNA, 601 bp, Homo sapiens
  misc_feature (301)..(301): S = C/G
aaagagtccttacattttggacacttatgacccataaggacataattgaggaccttcatcttaagttgctgggactgtgactggctatagttttcttttatctagtctgtggtttgtaaagtgtgacaatgatcaatttcatgatttgaaaaaaccttttaaacataaaaagacaagcaaatgattgtacaagcccagactgtcctgtagagaggcagaatatgcttgaaccaggctggttcagggagggctcccttcccaggggcctcctacctttcagggaggaacttctcaggctctstccagtactttgggtcatgatgaagaacatagcttggaatcatcaccaccacccctttgggaataaacatcccattgatttcaacatcttttttgcagaccctctcaagtctcatagcaactgggaataatctgagtgtttcattcaccaccatgtcaagatactccaactgtagcacagtatcataggtgggtggtgcctgaaaagaaagaaacagatttggataaattgagatttttgaattaacttttaactcagtccatgtagtactgttgaactgttagaagttccagagaacaa

SEQ ID NO: 251 - DNA, 601 bp, Homo sapiens
  misc_feature (301)..(301): M = A/C
tcagtctatgtctgtgtgtcagttgctgtcatcagtctctttctgtatccttcctttttctccagatctatgtatctctctgaccctctgtctctttttctacagtatccacagtcttgggaaatggctcatctctgtcactcccagagggccagtctctgcgcctggtctgtgcagttgatgcagttgacagcaatccccctgccaggctgagcctgagctggagaggcctgaccctgtgcccctcacagccctcaaacccgggggtgctggagctgccttgggtgcacctgagggatgmagctgaattcacctgcagagctcagaaccctctcggctctcagcaggtctacctgaacgtctccctgcagagtgagtgcaccagtatgctggggaggggctggagaggagaacacacctcctccacccttagtaactgctgagcgtggaccttcagagaggagctccgctctggtctgtgctcagctgtgaggtctggaacttccctgggacccacagcaccactgtcctcttcctgccagggaagggttgtggggtggggagagggcaggagtggatctcagaggggacaggatggggc

SEQ ID NO: 252 - DNA, 801 bp, Homo sapiens
  misc_feature (401)..(401): R = A/G
atttaatggtattatccagtgtgaaagtattttttaagtattttattaatgcacaaatcctcatatctgtactgtatcctttttaaaggattttatcggatacagggacagcttacaacacagaaaaataaaggcactaattctaaaattctgtaattctgcttatgtatgggagatttcggaccactactgacaaaatgcacattaaaaataagaatctatggcctctcctcttggaaaggtttgcattagcaactggagtaacatcagcatacaggcagcagggagggcacagcttggaatgggcacaggctatcttttttcctgacttccatttttctttgaacataacagcattaccttctgccatatcaacacagtccctttcctatacatcggcrgctcattattatagttgatgttgaattcagaaaacaaaatctcattcttgtctgctgcaagagttccctgagaaaataaaaatagatattaaaagctctgcatgtcttctttctcccctagtgctactatccattcgacccacaacctaaatttccacaatcaagaagtggaaggattttatcaaacatcttatagttattagtaaattttcatcttaagggcaattatgatcttacttagataaaattctctcctataccaaacactggcttcacaagtcaagactgaaagggagtggggagaattaatactaactgaatacatattatgtatttggtccagtaaaacttagaaaggttatataaattccccaaggttaaaaggttgtccttattcttc

SEQ ID NO: 253 - DNA, 801 bp, Homo sapiens
  misc_feature (401)..(401): R = A/G
agaaagcagactcaactgtgacacagcagagaccatctgcctttccagagcttactgcagctgaaaagacagataatagtgtgtgggcagagggtgaacctggagacttgaaggaaacaggcccctcttcttggtggacagtagaggaaaataaaggaaaaaatcagggtgaggaaactgaccaaactgggctcaaaatccatgcatgctcactgacacttttctggcagcagtggccaggagcagacttcatccttgtgaggtgggtatggcaaccaaccctgcgagtagtgggatggggaaggggttgcctctgcacctatgtgcaattatgtggcagtctctgaccaccttcctggtttcctgctctgattgcaggggggacatatggtggaaaaccrtgatggagctcaggagcctggatacccaaaaagccacctgccaccttcaacaggtcacggaccttccctggacctcagtttcctcacctgtagagagagaaatattatatcacactgttgcaaggactaagataagcgatgatgatgatgaacacactttgtgaataataaaattatctgaatgttttattcctgttgtttcctaagtttccttcaaactctgtctgcatccgcacatttgatctctaggggaccagcttctctagtttgccctctttcctccatcataaccctttcttatcttcagttcacctgatgtcccctgtacgtctgggagctgccttagatgctgttataatcagggaagggcactgtacacaagcccagtgagtagaaaggc

SEQ ID NO: 254 - DNA, 401 bp, Homo sapiens
  misc_feature (201)..(201): K = G/T
aaaatattactccatggaacttagatgtttttgctaattcttgaataaagacaaacaagtttgtattttaaagtaccaaactacctaatgtgccaagaacttttggcatattatgtgactttttctagaataaaaaccaaggttatttgtataagacattggaaacaaattcctcttgacattttctttctgtttatcagkggcctgaggcttccaccactaaacgcaaagctgtagatacctattgcttggattataagccttccaagggaagaaggtaatgatgttttttagcatatgtggaaattgatattattgtattctgtagctctggaaaaaactaattattcagatttctgtgaagggtttagcctgaaaagaatctgttgagaaaggagaaa

SEQ ID NO: 255 - DNA, 601 bp, Homo sapiens
  misc_feature (301)..(301): R = A/G
gtctggacaagctgggcctgggagccgacgtggcccaggtgaccggggccctccggagtggcagggggaagatgctgctgttcagcgggcggcgcctctggaggtgagcgccgccgcggccgccggcagggggagcccgggcgccgtcggtccgtccgctagccggctcagcacctgtctcctccgcgcctgcccgcaggttcgacgtgaaggcgcagatggtggatccccggagcgccagcgaggtggaccggatgttccccggggtgcctttggacacgcacgacgtcttccagtaccraggtgagggctgaggaggatcccttcgtgagacaccacactaagctcctcttagtgagtggtcaaattctgagcgaggaagaaaaagcccttggaaatggaaacaaatgccccagcacagacaagatcccagcagaggcagaggccttctccaggtcatttaggaagtcagggatgcaaccaagaccaggacccagatttcctgcctccccggctggaagctctttctccttcagtacaggacggcaggtggtttgtatggaagctcagttattagacaacagtcatcaagtgccgataa

SEQ ID NO: 256 - DNA, 801 bp, Homo sapiens
  misc_feature (401)..(401): R = A/G
tgctggcaaatgcccaagttgggcttcgaaagggacgagacctcagccttttgaagtcatccagccccactcagagtccagcatagttcctaccacccagatctatgcttcctagtgctcactgattgggtgtctggacaactatcagatttgcccatctgtggatctttcctagtcctgtctacttacagaaagaacttgacagattcaaatggaatctaagagagcccattcctgctggaaacaggggaaaggaagtatgactccccaagtctcttcacctgcatgtgtctacctgtatataagatggctgagctcttctttcctgcctatctttttcccagaactgtttccagcgccaattctcagagctgtaccctcagctgaaccccaagcaggargccccatgaccctgagttgtcagacaaagttgcccctgcagaggtcagctgcccgcctcctcttctccttctacaaggatggaaggatagtgcaaagcagggggctctcctcagaattccagatccccacagcttcagaagatcactccgggtcatactggtgtgaggcagccactgaggacaaccaagtttggaaacagagcccccagctagagatcagagtgcagggtgagttcgcatcagagtgcaggttgtctgtttggcatgcgtgtgagtgaaaaggagggataggataaattgacctgtgagctggggttcagtgtgagcaggttaagaagggacacagagggggcaggaacaatgggccagaatccctgatgatgagagacagcacaaatag

SEQ ID NO: 257 - DNA, 601 bp, Homo sapiens
  misc_feature (301)..(301): Y = C/T
cactcgcatatacccttaagtggattcagttcttgacgttagctttatgcatattaattctcacttgagaaaaggtggcttacattcattatttctgttcttcacttgccctcctccccagctcatcaggtgtggctgaggtaggagtaacagtccctgacaccatcaccgagtggaaggcaggggccttctgcctgtctgaagatgctggacttggtatctcttccactgcctctctccgagccttccagcccttctttgtggagctcacaatgccttactctgtgattcgtggagaggycttcacactcaaggccacggtcctaaactaccttcccaaatgcatccgggtaaggaaaatgagggtgaacaggaaaggtgggtagaacaaaagattcctttgatcagtcagctactgattctgttcctgagactaaggataattcaagggattgtgtgttagcactgtgaataattagtgctatgcaaagcaggacatgatcagaaagataatacaatgatatatgtgctatgggtgcttaaatcacggctctctaagccacaccttgcttttctatttcttagcgcttgcagaattctt

SEQ ID NO: 258 - DNA, 401 bp, Homo sapiens
  misc_feature (201)..(201): D = A/G/T
cctcacatggccaggatgggtgaggatcaagtcataaccacccttccagggagctgctaagacttagggccatggcttggggctcctggtgctcactggccttgtgggggacccactgactttcaagtgtagatgtggatgtgggaccagggttgctatggggcagtgggctcagctctgggctctgggatccacaggagdtgaacaactaccggcgggccatgcagaagatggcagaggacatcctgtctctgcggagacaggccagcatcctggaaggagagaaccgcatactgaggagccgcctggcccagcaggaggaggaagaggggcagggcaaagccagtgaggcccagaacacgggtgaggatgtgcaggccaccaagggcacccgggcttct

SEQ ID NO: 259 - DNA, 501 bp, Homo sapiens
  misc_feature (251)..(251): N = A/C/G/T
aatcagatctctgaggagataaagagtttttgttttgttttgtttttttttaactctaaattcctacaaagaaaaactggtctcacactgggagacagatgagtagaggaactgtttacatatcctcaaacccccttcacagctgtgctgccttctctgactgtctagaatgtgacttccatagccttctgtcttgtgggttctctcacctgaacaggctccactgtggattccatcttcaattgtccacngttgttctccttgttccaacttgaagagtgcatccggtttgctggcttgataccctgttcatggaaaatgatagaggacttagacatatcaaattgggctggcaatgtcaagaaggaagaatgttacatttcaagaaacttgagtttcttaaaatacccaaaatttagtttcttatctgaaactatgaaagtttcgtttcatatctgtaacatcaaggtttttctcttacaagagggtagattacaccgt

SEQ ID NO: 260 - DNA, 601 bp, Homo sapiens
  misc_feature (301)..(301): R = A/G
gcttccctcacctgatgactccatcagtggagccagtacacagcagactctcggtgactggaaccatgcagtcgatagattcagctctcagggcaaagcggtcacttgtggccccaaagccattccaattgaagaggtagatggtaccttcactggagccacaggctaccttcttcccccactgcagggaaatagagaaaacaatgtggaagctgcctcagactaagcccccagcacacacccctccatcccaccataaccagctgtactttcatgagagtgacagaggtcaggtccccaractgaggttctgagagcagctcaaaccgacgcctcttaatgttgaagatgccaaggcagccatccccgctgtagagagtagagcagtaggcttagacgcaaggtctatttgaggaagacatttcacacagggaggggaggggaggcaaggcagctttgaagttgtacctggctgtcagcagcagctttttggctggatccagagccatgtctgcgatgtactcttcatgttgcctcatatccattaaggggccctccttccgctggtcccagagacggataccacctgtgtcatccccag

SEQ ID NO: 261 - DNA, 713 bp, Homo sapiens
  misc_feature (217)..(217): N = A/C/G/T
agtccgagggtctccttgggcccttcagctttgtaaggaagatgagagagagtcggccgttgatggtgcagactgaggtgaggcagtccctcagcaacacaggacgggaggcagtgggacgagggaccctggggctccacgcagctcagacctggggggacgcctctcactcccgtgcctgcttcccaggctcagtacgtattcctgcatcagtgcntcctgcggttcctccaacagtcagcccaggccccagccgagaaggaagtcccgtatgaggatgtcgaaaacctcatctacgagaacgtggccgccatccaggcccacaagttggaggtctaagtgacgagggggctgggtcggcagcccaggcatcctcaagctctggacacccacttgagcccagattcctggaagagcagagggctgggctcccagactcctgggtgctgtgggaggagggggctggtatcccaaactctggtttccccaggagagagtggtctggtgggcttcagatgagtcctatgggagctggggatctggattcctggttccctgaaggaggagagggatgatagcttggattccctaggtctttccaggatgcagaaagaaacaggctggggcctggattctgaggcaggaaggaatttgggtctggagttctggctacttgaggaccaaaggcaggaaggatcctgccttgattttac

SEQ ID NO: 262 - DNA, 601 bp, Homo sapiens
  misc_feature (301)..(301): N = A/C/G/T
tcacgtggaactcgtggctgccacactggacagtgcagaactgggcctccctgcctccacctgctggatgcaatggttaaggaagggctggaaagtttgagggccagaaactacaactgattttccctcctgtgctggttttcagctcccaacccagtgagaaacctgacagtggaggctcagaccaacagctccatcgccctgacctgggaggtccccgatggcccagacccacagaactccacctacggggttgagtacactggagatggtggcagagcagggactcgaagcacagcanacaccaacatcaccgtggatagacttgaacccgggtgtttgtatgtgttttccgtgtgggtggggaagaatggaatcaacagctcccgggagactcgaaatgccaccacaggtgagaggcagtcgccatttgtttgatctcttatttgtttaagggacagtaagcagtagaatgtagacgattgtctattccatagtccctctgggccatattgagccaggtactcatgtccacatcctggggcagtctcagctcaggagatgaagaaggaatgaatgtccatggtacctccagctgcta

SEQ ID NO: 263 - DNA, 401 bp, Homo sapiens
  misc_feature (201)..(201): N = A/C/G/T
ggggtcattgccggagcctttgtgggcatcctcctgtttctcatcctcgtgggcctgctgattttcttcctgaagaggaggtgagactcagcacagggctgaccgcctggagggtgggggctggagaagaaggaggaggaccgctggttgcagcctcaccccctgagcctctcatcctaacgtccttttcccaggaataanaagaagcagcagaaaccagaactcagggatctggtctttaggtgagcagaaggtctggggggtgcattggaaagaatctggtcaaatcaaggggtgtttgctggctgccagctaggtcagagggtggatcaatgcatttacccacaaaggtctcagaaggggcccatgcctctgcgacagggaccacggcccttccatcg

SEQ ID NO: 264 - DNA, 801 bp, Homo sapiens
  misc_feature (401)..(401): Y = C/T
tacatgtatgtatgacaataagataatgaaccacagagaaaaaaaaatcagttaatgatttcataatcataccttatatatgtgtgacattttcagttctttgactacattaaagtaatttgaattggttacttgctgtgggtaggaagttaagccagctccatttcattatttccagttcttcacgaaagaaatgaaaaggtttgggggtaaggtgtattgctaattctttcacatctctgttgtaaaatttggttccattcttgattgcttttgttgctattatttcctttcttcttgtatttaaacattgataattacttttcagcaggataattgcactcacttggaatttgtataactgtagtacactcaccttttccagctaggtaatgaagagyttcttttcattgctagaacatcattgcacagctcctgtttttcttcaaaagaacatagacaaacaatcgcatttggatgatcacacaataaactgaaccaaaagaaatgttagcagttcattaactacctctgtataatatggatttgtattgaaacatccatttataaaactgtaccagttgtaacgagatctataatatgttcttaaggtagtttataatgttttaaaataaagtttatgtagtatatatagttatccaagagagtgtagcttttttttggtaatttttaaatggacattttttaccagagcctggagtatgatcagaactgttgattccctgctttcaccagcctctaccaagacaaccatcttcccccaataacccactctctcct

SEQ ID NO: 265 - DNA, 601 bp, Homo sapiens
  misc_feature (301)..(301): W = A/T
agcaagaacttgtctcaaaaaaacacaaaaaacaaagagtagggtggaaagggagtcctgctgaatcagagcagctccctcgctcagtggaggggctgcagcagacagtatctgctgtggagtaaaagggggagcccattcagagtgagatgggaagcattttgagtgtcctgcctcctaatctttctttactccctctttcccctatagaccatagtaacctgggaggaggagcacctggtgtgtgtgcagaaaggggaggtccccaaccggggctggagacactggctggagggagagwtgctgtatctggtaaatggggtgggggctgggtgtctgggagaagggcctccagctataaggcatccccttgtccaaaccagataggtccaccactcttcccccagcccagccccaatccctatccaaggaattgaccagggagggaaagcaaaagcactgggaggagtggggagaggaagaaacagagtggccaaggtgggccctggctacgagtcggatgaatgcccataaatcatcactggcgagatggaggcttcagccactcacatcccctgacccagccaccttccttcctgag

SEQ ID NO: 266 - DNA, 601 bp, Homo sapiens
  misc_feature (301)..(301): R = A/G
gctggacccccttctggtcctctccatcccccagccttgtcaccaactcccatgaccaccccatgcttggcctgcagacctgtgagagggacttggtttctgtggtttgaccctcgacacattctgagtacagaccttagacccaggtctctgtgcctgcacggttctgagaagaccccctgtgcacacccagttccatcccctgaacccagactttgggtccacagggcagggctaggagtaggacaacggaaaaagctttacctgaatttgttgttgagctctttcagcatgaagagcratttcttcagtttctagaaagagagggaatgacagagttctcaagccaggatgaataaaaacactgttttttcctttcttctggaaacctggccacagcttgcaggagaaggctcacagcccaccacggaagttggtttacatatggggctacctggccaaggacctggttgtcagctgacaagtttagcttgtctctcactccaactaaactgtagcaacttgtgtaggccctgcctcttaatgggggacctggaacagctgggcccccacccatccagccctggcagaggggcctgcc

SEQ ID NO: 267 - DNA, 549 bp, Homo sapiens
  misc_feature (349)..(349): S = C/G
accccggcccagccaggccagccagcctcggcctgggcccgcaagcctacggccccccggccccgcccccggcgcccccgcagtaccccgacttctccagctactctcacgtggagccggcccccgcgcccccgacggcctggggggcgcccttccctgcgcccaaggacgactgggccgccgcctacggcccgggccccgcggcccctgccgccagcccagcttcgctggcattcgggccccctccagactttagcccggtgccggcgccccctgggcccggcccgggcctcctggcgcagcccctcgggggcccgggcacaccgtcctcgcccggagcgcagaggcsgacgccctacgagtggatgcggcgcagcgtggcggccggaggcggcggtggcagcggtaaggacccttccctcgccctgcgcctctggacctgcaggtgctcgggcgcggcccaggccgccccctgtctgacctctgctccggccctgctcgggttcccgggagtgtggccctcctgtccactctcgccctggggggctg

SEQ ID NO: 268 - DNA, 801 bp, Homo sapiens
  misc_feature (401)..(401): R = A/G
tttttttgcccagtcaaatcctatttacacttccacagtctcacctaaattgttcttgctccctgacaccttccctggtttcctttgagttctcagattttattgtaccctgtatgttcgtacctattttattctgtttagattatagtggaatttgcttatatattgcttgtattatatggggacattgtgctatgttttattttttcctatctcttggcatatgatgtttttcttgttgtcaaattgaattttacatttgagaaaaacacaattaaaatcctcagctcaaagagatgtaacattagtttctgccaatgtagatgtttgaaccttctgctttaagtagaaatgaaatatatggccaacttacttcttctatctcggcaggagctttgcartgaatatcgaaagcttgtgaggaacggaaaacttgcttgcaccagagagaacgatcctatccagggcccagatgggaaagtgcatggcaacacctgctccatgtgtgaggtcttcttgtgagtagccctgcagctgggaacatggaggaatgattttgttctttctatttcatttccatgttcaattatgggagggccacttcaacataaaaatgaaagaattaaggcatatttagagaaactgtctgattggagacatgtatttgaaaatccatgtcctttgaagattgtcaagacttcacacttaagcaaggagaaagtcataatcttgaaatattcaagtagttttgtcttttaagtgtggaaacaggacaagttctagcttatctccgtgaataaa

SEQ ID NO: 269 - DNA, 601 bp, Homo sapiens
  misc_feature (301)..(301): M = A/C
gcgctgtgcaaatccccgttcacgggtgccctccaccaccattccacagctggcaatgcagttgcacggggccaagcagcctgctggggatgtggactgggaagcagcctgctggggatgtgggctgggaagcaggccagccccgtctgaacaccagctgtctagggctaggacctggaccctttcccacgcagcatcctgtcaggcgagaataaggcatttctgccaaactctgccttctgagtagccacccagccctccttcccccacctgttgttgttgtaatattccaggtagaatmtcttgggccgagacagttcctccacgcggcgggacaccgctatgcaaaatgggaaacggagtcagtgaaccccagtgtcaacaccctgcagttcccaggggcttctgcatgcggaattcagcttttcatgagcttgggcaggaggctgaattggaagaactgtgggcagagacaactgggggccagacaccctgcagagagaagacttgctgtccctgatttagggacaatgggctcagaggcttgaaggtcctttctcggacaccggatgggagtggcagggctggaacagcagcccag

SEQ ID NO: 270 - DNA, 801 bp, Homo sapiens
  misc_feature (401)..(401): Y = C/T
taaatgagatttaaatcaaatattacagaagtaagtgagggaaacatagctgttgtgaataataataaagaaaaatgagggagatgatggggaagggggtcaaggggatagcaaagggagatggatggggagatgacagaggacacttaccttgcctagccctgttgagctgcctctcctagggctgggctcagaccctcagtcctgcgcctttgagggcccaactgcctcattgctgctgtcacctcttgcttcttcagggatcctgtatgtcaacgcaagcctggactttgagacaagccccaagtacttcctgtccattgagtgcagccggaagagctcctcttccctcagtgacgtgaccacagtcatggtcaacatcactgatgtcaatgaacacyggccccaattcccccaagatccatatagcacaagggtcttagagaatgcccttgtgggtgacgtcatcctcacggtaaggatctgccaccttgctctttgtgggacaagaactctgggatgggttcttatctcacccccacacccagccatctatgagcatggattagtttattaagttaatacactgtagacttgactctgacttgtcagaggtttatgtgagatttgagtatggccaaacaatgctcggccaaactatctctcctgagagaatgtctcagagccatatgataagatcagagacaatggaatggggcatgggataggcgaggtttgttaggagaagagagaaaaagagacagaccccagaggactgccagaggctctcaagcctgggaa

SEQ ID NO: 271 - DNA, 601 bp, Homo sapiens
  misc_feature (301)..(301): R = A/G
tagtacacatttgaaacacatcagaatcacctgcatgtcttgtgaaaacacggattgctgggcctcaccctcgaaattttgattcagtggatttagggtggggccagagaatttgaatttccaagttcacagtaatgctgatggtgccgatttgggcccacaatttgagaaccaccattgtagagatccctgttcacccagctttttggatccttacctgtaacagggtgaatcataaagaatcccatgtggttcccactggtgatgttgaaggtcagcttccctttggagctggagtctrggtcccaggcatccagttgaagcacagaggtgcccacgggagcatcctcctggatggaggggtagaacacagcttgggacatctggggtgggttgtcattggcatccgtaacctcgatgtagacttcagttacagaagagaggggcacagaacccctgtccactgctaataccgtcaaccagtagtaagatgcaaattctcggtccaggggtgccagagtctgaatcattcctagggacagtaagtcagcaaacccaaaatactttagagctcaaagtggctttagaaatcacccttacc

SEQ ID NO: 272 - DNA, 801 bp, Homo sapiens
  misc_feature (401)..(401): N = A/C/G/T
gtaggggtcagggccagatgaccccaattctctaagtagcacctctccctcctgtgctctcacagggctctgagacaactcctccccagacacagatgctgcctcgttatctgatgcattgcaaaagagaggacagttataaggggtggggaagagatggaatctctctttctctgaccctttttaaaatctcaaccttcccacctgatcttaatgcccaattctgaaccccatacgctgatattctgcctttactctacacactggaacccaagatctgagagctgcagcccctgcgtagacaaaggagttggctttggtgaagagacgggtgagaaggaagggggtctggagaggatgacttactcaccagctggagagtctgactcctttggactggnggtgatactcctagaagtctctgggaaccaaacaaaggctaagtgtgaaatgaaaccatattcccgccccctgtcactgtgcctactccgaacacacacacacatggggaggcacaattccacagcatttaagaaaagcatgggccgggcacggtgcctcatgcctataatcccagcactttgggaggctgaggtaggaggctggcttgagtccaggagttcaagaccaacctgagcaacatagaaaaaccctatctctacaaaaaaatacaaaaattagccaggcgtggtggcacgtgccagtaatcccagctactcagtggaggctgaggcaggaagatcacctgagccctgggaggttgaggctgcagtgagccaggattgtaccactgcactctag

SEQ ID NO: 273 - DNA, 601 bp, Homo sapiens
  misc_feature (301)..(301): R = A/G
taatgtgacatgtagagaaatatttattttaaaacttggttgtttctaaatttgtattaaaagttcgggtaggtgattgagagaatattgtatcagtcctggctcttgtttcttaaaaagagtcagatatgagatgttctagttaaaccttttatctgtaaagaatttgaaaacttacttgttaaagaggtcaatttatttatattctgttcttactgcttgtagtttaaaaacgaatatggacttatttttatcttttacctattattatttcataaacttttcatatttagttaataartcatgctttgaaagaactcatggaaatagaagaagtgagtgaaaatgtattacaagttcacttaaatggtaagtatgccattattttgccattggagattatgtaaactttgtggggtttttatatgacttgtatatttcaaatccattttaatagttagattttgaaaactagatccatgttttacttagcacaccatatgcagtatttttagaaattaaaataataataatgaaggagtcgcagaaggactctggtttttgtgggttttttggtttttttttttttaatcattctaat

SEQ ID NO: 274 - DNA, 1001 bp, Homo sapiens
  misc_feature (501)..(501): Y = C/T
tggagtccctggcttacctgttgttgtccctggcttacctggagtccctggctccgggcttccctccgcgtgctgctgctcctccaggtcccccccggtggctctcgcgcgcccccaggcggccacgtcgcggagcagctccgtcacgttgtgttgagtgatctccccggccgtctaacagtagaaggggcgtggccagacgtcggggccaggatggcggggcggggcttagaacgctgggagtcctcggtccaggactagaactcccgcagctgcttggaggatgtgaagtggggcgggacctatcccgcggggatggggcctgttctctgaatggagtcgttcccaccaagcgacgggcggggtctggagctgggggcggggcctgctgtgggggcggggccttgcgcacccaccgacccccagccccacctctacccccagtcccagcctcgccgcgcaccttgactggctggccgttgctcgtccgcaggaggctcycgtcgtccgcttcgatgccgaaggccacgaagggccccgtggcgatgtccccccagtacccgcgcgctgccacgcgctccccacgctggaaaaggagggagagaggaggcaggtgaggtcgatgttggggcccctgactcctaggactccgagcagcagcagtgggccaggacaggcagtggacacgcacgtagctcaggaggcgaccggacgccagggtccggttgggcacatgataggcgctggagtccctgagttcaaaggcgacgcctgtgtcccgccagcgtcggaactcctgggggtgaatgacttgagcctggggtggggggcgggaagaagggagccctcagtgaaccgagcgtggagagacccctacaccagcctccctcagacccaggagtccaggtccccaggccctcctccctcagacccaggagttcaggcccccaaaccctcctccctcagactcaggaggcccccagcccctcctccctcagacc

SEQ ID NO: 275 - DNA, 746 bp, Homo sapiens
  misc_feature (501)..(501): K = G/T
attgattcccacatccagtgagaccaactcacgggaatctaaagggaatgatattacaatttatgggcatggaccttatggacttgacatttaaccacactttgcagatcttacctgcaacaggtaattcttctgaaatagaaaatcaaactcagaatgccatggatgtaacaacaggttatggaactaaagcttcaggaaataaaacagtttttaagagtaaacaaaatactgcttttcaagacctttccataaactctgcagacaaaatacatattaccagaagtcatattatgggggcagaaactcacatagtctcacagacttgtaatcaggatgccagaatattagccatgaccccagaatctatatattctaatccatctattcaaggttgtaagactgttttctattctagttgtaatgatgccatggaaatgaccaaatgtctctcaaatatgagagaggagaaaaatttgctaaagcatgacagtaattatkctaaaatgtattgcaatccagatgctatgtcttctctcacagagaaaactatttattccggagaggagaacatggacattaccaagagtcatacagttgcaatagataatcaaatttttaaacaagatcaatcaaatgtgcaaatagcagctgcaccaacacccgaaaaagaaatgatgctccaaaatcttatgaccacatcagaagatgggaaaatgaatgtaaattgtaactcagttcctcat

SEQ ID NO: 276 - DNA, 1003 bp, Homo sapiens
  misc_feature (502)..(502): Y = C/T
gattatccccattttatagatgaccactgaggcaaagcaatggggacctcagtcccatcctgtgccctcctttgcccagtaggtcagggctggtcttagggcagagtcgctggctgactctggagaaagaggaagaggctgattcctcaataagccagggagagcccaggagcacttaactgctgagaggcctgctgagggccttttgctctcatttcatgcctgtgtggagcatgagaaacagaaatatgcctatgtcaaggatgcatgaccctaagagccctttcttgggcttgctcaggttcggtggtgagaggaagcctcgcagaatccagcagaatcctcacagaatccagcagcagctctgctggggacatggtccatggtgcaacccacagcaaagccctgacctgacctcctgatgctcaggagaagccatgggcccctcctgtcctgtgttcctgtccttcacaaagctcagcctgtggtggctccttctgaycccagcaggtgagtgtttgtcacctgtcattgtaagacttcatctcatgcctgtgggctcacaaattgtaggaaggagtctgcaggtggatgtgttgcaaccgtcaaagctgcaggggacttcagaggccatcagccaggtggctgtttccactggcagaggtggaggggcagtcacagctctgacgttagcatctgtgtcaccttaaatgtccccaagcttcaatgtcctcagctgcaaaacgcaaatagtgttgtgtacctcccaggcctattgtgaggattaaacgcaagtttgtgaccagaatctgggatacaggaggcactcgggacacagcgctttctgtcccagatggtgctgacacgtttttctgggatttggagctgtagttctcgactcgctcggacagcagagccctgaaggggtgaagctgtttgctgaacacagtgaaaactgacatgagcgatgccatagaaacattttgaaaagttttgtttatct

SEQ ID NO: 277 - DNA, 801 bp, Homo sapiens
  misc_feature (401)..(401): Y = C/T
tctagttaattcacacttcattttattttttgagacagggtcttgctctgtcacccagactggagtgcagtggcacaatcatggcttactgcagcccccaactcctgggctcaagtgatcctctcacctccaccatccaaatagttgggactacacatgcatgctgctattgctctgctaaattaaaaaaaaaaaattagagatgaggtctcactatgttgcgcaggctagtcttgaactcctggcctcaatgaactcctcaaactcaaggctcacacatcagcttcccaaagtgctggaattaaaggcatgagccaccatgcccatcccacactttattttatacttactgaactgtactcaccagcttcctcaaccacaataaatgattcaggtgtccytacaggaagtggaggggggatttcatcatctatccttggagcagttgctatccaaaatgtcaaaaatattgtaacaattgttaattagaacaatccaaaggaaattcttatattctaatattaaatataaatttaccataatttatatttaaattccgttgaagcaacattatcagtaaagttgacacttgttcattcaaggaaaaagcaaaataaattctcttaaggtacaaacccaggaggtttttgcttattctttaacatttattgttttaaaagctcaaaagtagggctgggcgcggtggctcacgcctgtaatcccagcactttcggaggccgaggcgggcagatcacaaggtcaggagatcgaaaccatcctggctaacgtggtgaaaccgtg

SEQ ID NO: 278 - DNA, 501 bp, Homo sapiens
  misc_feature (251)..(251): N = A/C/G/T
acatcagtagcctcaaaaggcacaggactcagatgataaggagccactgcttgacccagcctggccacagaccatgctcagtggtcagcacaggtggcaggtcaaagctggagtgaactaggctgggacctcctcaaaccacctcccctctgcatgctttacaaaggaaacacccagaaagcgggagcctgaggctgcatcccccagccactcccagccacagaccactgtttccatgaggatcagccgcntgtccagctcatgaatacgctcattcttcatctcgatgacaaagtgtaagctctccagctcctgctcccagaactggctggggctcccataatcctagacagggacagagtgacctcattaggccagtaggctacctccctcctccccattctgccagcaactcattgttggactttcacaagtcacccaccttcctctctcagcccatgttaagtgtttaatatgctttatctccctgtatccgaatat

SEQ ID NO: 279 - DNA, 601 bp, Homo sapiens
  misc_feature (301)..(301): Y = C/T
ccctggtcctcagcactgccacagccctcgacctcagatcccagcatcgccaaccatgcctcagtgggaccaacactccaaacaacctcggtgtctccagatcccacaagggagtcagtcctgcagccttctcctcaggtaccagccaccactgtggcccacacagccacccagcaaccagcagccccagctcctccggcagtgtctcccagggaggcattgatggaagctatgcacacagtcccagtgcctcccaccacagtcagaacagactcgctggggaaagatgctcctgctgggyggggaacaacccctgccagccccacgctgagccccgaagaagaagatgacatccggaatgtcataggtaagttcattgtacctggccttggtctcctgatcagctcaggtaaaaggctgagcctggaaatatcttgagaggagagggaggcaccagatggtcaaagttctttatgggaatggcaagtggagttaagcctttgaccaacgattagttttaacatctagggtttatttattgaaaatgtgccagtggcaagggtgggactcttttttcctaaaatagacatataaattaatg

SEQ ID NO: 280 - DNA, 601 bp, Homo sapiens
  misc_feature (301)..(301): S = C/G
acagtgaaggcgagccccggtcccgcgcggtaaccaccagctcgtaggcggacacactctcgcggtccagagctctgtccagcaccaacgagtagtaattcttgtaggtggacaccagcttgaaggggacgtggggcgtcagggagcaggtaacctgcccgttggcatctgcgtctaggtcgatcacactaatcagggcaataactgtccccagttgtgcgtcctcttttacaggaaccgagagcgttttgatagtcaactgtggagcattgtcatttacatccacaacttccacaagaastgtacaatgaccagccaggggtgggaagcctttatcgacagcctcgactgggatcttgtgtgctctactttcttcaaaatccatatgtcctatcactgtgattgccccacttaaggggtccatgtggaacttggattttatatctggagaaacatcactggagaaggagtaaataatatccccattcaagccttcgtctaaatctgaggcattggggtgaatcaccagcgttccgatagaaacgttttctggtaatttcaccgtatacagggttctgtcgaacactggggcattgtcatt

SEQ ID NO: 281 - DNA, 801 bp, Homo sapiens
  misc_feature (401)..(401): R = A/G
agtggtaaaccataaattaataatttcgcttaaagctgagcacgtagtaggtgcttttagaagtttgttctcctctcctttcctttcttccaggtctgccctggcacattgctctggttgggaattccacacaaacttaataaaattaatggctgaataaagtgggctagaaggaccttcgaggccatcctctcaccctctgcctgtccctgtttcttaggaccaggtagaacatgagaagcaaaggatcctcacagaatttgaactcctgcatcaagtcctagaggaggagaagaatttcctgctatcacggatttactggctgggtcatgagggaacggaagcggggaaacactatgttgcctccactgagccacagttgaacgatctcaagaagctcrttgattccctgaagaccaagcagaacatgccacccaggcagctgctggaggtgagtcccttgggggcagaattgcagagaggtagcagcccatccctagtctcaggtcagagcatggaccactggcagaatacctgagattgccccaaccatcctacctctagcccagtgctgtccaatagcaatatgtgagccgcatgtattagaatgaaaatgtgagccacatatgtaattcataaatataattctggccacatgtgtgatttagaaatgtagtttcagccacatatggaattacaaatttttctagttagtcacattaaaatgataaaagtgaaattaattttaataaaatattttaactcaatatatctgaaatattatcctttcagcctgtaatg

SEQ ID NO: 282 - DNA, 801 bp, Homo sapiens
  misc_feature (401)..(401): S = C/G
gagtggaagggtgcactccatggacggcccccgcccctcacccgcctcccgtgctccttccaggacactctggaggctccagcctcccacccacagggccgccctccacacctggtgagtcactgaggcctcgtggggagcgccgcctcccccagggcagtctgagtctcccaaaggatcccactcccctcccctcaaggacgggcttgtgtcccaggggctctgaggctgggctggtgaagagtggggggtcgaggcagagggagatgttggggcccagccaggaggaggagccgggctgatgtggggggcaagacagccccagccttcacctccctgtcctgacccaggaggtcctgaggaccagccccttaaccccccagggtcaggccctcagaatsgtgagtgaggggctctgagtgggagatgggcggggtccaggggaggcaggggtgggttctgtcctaggttcaggctcctctggaggtggtgatgtggacaggcccctcccctgcctgggcctcagtttctccaagtgtaaaggagagaggcctgtgggtgggaaagttcctttcagctctgacccccagctgtgacctcctgggagaggaggcctcccagggaacctcccagacccgattccacaggggcctgtcccgtcccacctgcagcagtgacggtgacctggggcaggggaggggagcagggccgtggttcaggacggtcaggctctttccctgcagctccgggtctcggctctggtgcaggaacaagggctgcaggtcagactcccgggctccc

SEQ ID NO: 283 - DNA, 601 bp, Homo sapiens
  misc_feature (301)..(301): R = A/G
ttaaaggctgcagaaaacttcactcttttggttaagaacaacatctggtatcccaaatttaatttcagcaagtaagtggtggccaggtgtgtgagttcaccagggtcttggagaaacttctggctcttctctcttctctgaggttttcgtcgctctgattttctgcttcctctcgactttaggaggaatatccttcccaacatcaccactacttacctcaagtcgtgcatttatgatgctaaaacagatcccttctgccccatattccgtcttggcaaaatagtggagaacgcaggacacrgtttccaggacatggccgtggaggtgggtgcgggccctggctctcctgacccagccctggaggcgtctcgtgccaggtgctgaggaaagccttgccgtgtctctgctgctcatccccagggaggcatcatgggcatccaggtcaactgggactgcaacctggacagagccgcctccctctgcttgcccaggtactccttccgccgcctcgatacacgggacgttgagcacaacgtatctcctggctacaatttcaggtgggcgtgagcttgggcccctcgctcatgttgtagggggtgct

SEQ ID NO: 284 - DNA, 638 bp, Homo sapiens
  misc_feature (355)..(355): R = A/G
gctcctggggagagagcagaggtctaggaggccccatccaacccctgtggctcccgagtggcacgcgttcgaccccaagaccctacactcaccatggtcgataagtcttccgaacctctgagctccggacaggctctggaagtgctttagcttctttcctacacagcggcacccgccggcttccaggcttcacacttgtgaactcttcggctgcctctgacagtttatgtaatcctgggatgtcattcagttccctcctctgtgaaccctgatcacctccccacctctcttcctccgagccagcccccttcctttcctggaaatattgcaatgaaggatgtttcagggagggggrccgtaacaggaaggattctgcagggcatctagggttctgtgtctcctggcagtgtcctgatgactcaggcgccccaggcggtgaatgccctgttgactcgggagcctaagccttctctggtgggtgtgggaaaaggatgatcctcagtgccttaggccagtaccatactctgcactatccaaccccccaatccccctaccttatatcccagagaatctacttgattcatttctttgacttcttccttgtcttggtttatgttgatctcctgccaccaatccaa

SEQ ID NO: 285 - DNA, 801 bp, Homo sapiens
  misc_feature (401)..(401): N = A/C/G/T
cctctggaagaatcactggatcagatgttcggttctcagcaggtccatgggttccaagctgcccatctgctttcagaacctatgctgagttcgagatttatggaggagcccacatcccgagctgtgtttttgttccaggctcttctctagacctcaaaccaggagccagccactacattgggttctatacagagatccaggttctcagctcagctctagggctttagactctggaattcactaggtacagggacaggggagggggtcacttacgggcggccgcagtgagcagcagtgatgacccactggcctgaaagcagggcgcctccgcagaggaagcggcgcctgggacccgccagcagggccgcctgccacggctgggagctccgggtgcacgtatngccaccaattatcttgttctcatcctcttggctctgtgtcatggctaggagtggacaggattgggtggggaaagtagatgagcaaacactctccactccacaagtttgtaggattccaaaactgacaaatccccttccttttggtctaacccctaaactgcccgcctctatctgtcccacccagggtgagacatgcccaatattgaccccgttattgccccagcacggagagctttctgactcacctcccaagtcacctccgtagcatctcttattttgtgccgtggccaccttatccagggccttgctacatctacgacccttagctctatgctcccataatttctgtgatcacttctcgaaatatgccacatttccccccaatgagtccttccccaac

SEQ ID NO: 286 - DNA, 801 bp, Homo sapiens
  misc_feature (401)..(401): R = A/G
aatgtgcctgacctacccaatcctcagctcagctgctcataagaagcagctgaggagatgtatctaaggaacagaaactctgtttttggtgggggagagagaagtcagggactatgtcctgtttcttttcatctctgcaactatctgtctgtaagatattttccaccttgtttaactcacagccacaataatttcaaatatagctttaattatgaatcaccatttggtataaagatgctcatctttattcacttaagccactctaggtcctcttattggaaacactttacatttttcttcactgagattcaggctattctatcattccctcacagttccaaaaaaaaccagcttacctcacaacttaatgcaggttcttccaattctgatggtagctgatrctcaggaaaaaaatacagaagaatctccctaggaatacaagcacagcagatatgggaatatactaggataacagaggtagcactcaactgtcagaactgggtttgtctcctgggtattaaatatcctggcaaagatgaacattagttccccccaaacattttgtttttatcactgacatcaaagtgttcttcagaaagcatagactggggagaggaaggtgggtgtggctataaaaaggcaataggagggaccattctggcaaaggaactggtctgtatcttgactgcatcaatgtcaatatcctgattgtgattctgttccagagttttgcaagaagctaggtgaagggtacaggggatctctcagcattatttcttacaacttaatgtgaacatacat

SEQ ID NO: 287 - DNA, 601 bp, Homo sapiens
  misc_feature (301)..(301): Y = C/T
ccacccctccccaggcacaaagccctgctgcatgtggagtccgaagaatgcaggcgagtatgggggcacaggtttgccctctcggggcgcttttgtcaagagtcccatggactagagtggctactggcttccacgggaaggatggcagccccaggcagcccacccaacagctctgtgccttaagaggtggggagggcagaagactagggcacccctgtacccagggctcaggcctgtgacccccagtgctggcaagaggaacgtgggccaggagagttgtccaggtaaaagagatagcagygggaaacaaaggtctttggctgaagcatcctaggacacctccccaacgaggagaaggcatggctgtgatcacagggagctcattaaagctcaaggggacaccacgctccgggacagggtgtgtctgacatgcaggggtctttgtgggttttctcctgaattccatgtgctccatcctccaaccactttctctttctgcatttattaaaattatgacccaggatccgggtgcagggtgggcgggtgtttatgtgaggtggagaagggctgagaaattcaacgcatcctttttccgagcact

SEQ ID NO: 288 - DNA, 452 bp, Homo sapiens
  misc_feature (252)..(252): S = C/G
caaccaaacacacacacacacacacacacacacacacacacacacacacacacacacaaggtgattgctatgcaaattaaatatagcttcaccaatcagcttgcttctcctaatccctcatagaaatcttggagtagccctggggtgcagtgaggccagattccaggaagggaatgggtgggatgggtctgggtactggtgagcagcagggagggtaagtaggttagcttctgggccaaggagggctcctgsaggcttgttctgggtaaaagctggtctccttgaacctcggaaggtgggggaacccacatcctggtctcacccgcccaaccgcccactcacccttgggttagcagccatctaagccccaccctccccctcacacgcttagctagcctgccacaagctggccccttggcctcctagagaccctgacatctcctccagcagca

SEQ ID NO: 289 - DNA, 801 bp, Homo sapiens
  misc_feature (401)..(401): K = G/T
agccttgatcttcttaaattgaagctgtaacatttccttgtcattcctggattcctgaagatgtttttgcgtgttagctaaaacctcttccaaattctgcaatgtctttttagtatcattcttctctaggattattttgtatttgtcttcaattaattcttcaacattctcctttagcttattgatgacatcaatgaacacttgctgtttggtaatcttcatctgtagttctttaaccctcttctctaaatacaggttactacactggagttcttggattcgcacttcctgctttctgttagtatgttttaatttctgcaagacttcatttaaagccatgtcctcttgaacaggttgtaagctttcagcactttgctcccagtcaggcatctcacagttckcccgacatgcttcactcctccaggaaatgcctgccgaagaccaagttgagacaatttctggcctctccacaccctctgctgtgacttccttttcataactgactgacatctcaggaatctccccataattctgtatttcttttgaaggaactgcagtctgtaaattatagtaaacaaagtaagtgtgaacgagtagaaagataatgagctttcaagtcaaatagggctggccttgaattctattagtagatcccctgtttggctttctccgctataaagtaacaatagtatctacttccaataataatgcctattaacaaaagttaatacctatgtattaattgctaaatgtttgtacagcacctaacagcacagcagggcacaggcagtaggtatatga

SEQ ID NO: 290 - DNA, 601 bp, Homo sapiens
  misc_feature (301)..(301): Y = C/T
accattacacatgcacatttcctgctttgtgaagtgttcttggtactaaatctgtatccttttctatgtaaagaaatttatttcttgacttgaagagtatgtatttgaagtgatcaaaaatactactttacaggcacctcacgataagttcctaattataaatgtattcataaacacaggttttatttttcattctttatcagaaacccaaattattctgaaatgggggattttcttcgacttcactacctgtgctctggggtaggaagttggggataattggtttcagaaatttgaactyatttgacctggagcctccagtcacacacacctcatagtggtagctctgggacagggtcccggtgccactcacgtccaccagatgtcctggaaaggggccctcaggcaccgagcagcgaccgaccggggccgccctgctcctcctgcacagccgcaccgccacgaacaggagcaccgagaagaggaagagcgacgacactgaggccaacgccaccaccaggtagacagtgagcgagtcggcctgggcctgggccggggccgcctccgggagaggcaggtagggctgggagaagccgtccac

SEQ ID NO: 291 - DNA, 501 bp, Homo sapiens
  misc_feature (251)..(251): S = C/G
gcaattggactatgaggcaattcaaacttacacattaactattcaggccaaagacggcggcgggctttctggaaaatgcactgtagtggttgatgtaacagatataaacgataatcgacccgagctgctcctgtcttcacttactagcccaattgcagaaaactcacccgagacagtcgtggctgtttttaggattagagacagagattccgggaacaatggaaagacagtgtgctccatccaggacgatstccccttcatcctgaagccatctgtcgaaaacttctatactctggtaacagagaaacctttggatcgagagaggaacactgagtacaacatcaccatcaccgtcaccgacttggggacacccaggctgaaaaccgagcacaacataaccgtgctggtctccgacgtcaatgacaacgctcccgccttcacccaaacctcctacaccctgtttgtccgtgagaacaacagccccgccctgcccatccgcag

SEQ ID NO: 292 - DNA, 401 bp, Homo sapiens
  misc_feature (201)..(201): K = G/T
aagccatgttctgctcttgagcgagcacccactgggcctcatgcaaggtagaaaaagcctgcgtacgtcaccctcccatgatgtggtcaacatgtaaactgcatgggcagggcgccaaataacatcctgtgcgctgctgagctgagctggggcgcggccgcctgtctgcaccggcagcaccatgtcgctcatggtcatcakcatggcgtgtgttggtgagtcctggaagggaatagagggagggagcgtggggatggagatctgggcccagaggtggagatatgggcctggaggtggagttatgggcctggagtggagatctgggcctagagatggagtgatgagcctagaagtggagatctgcgcctggagtggagatctgggcctggagtgaagatctg

SEQ ID NO: 293 - DNA, 558 bp, Homo sapiens
  misc_feature (201)..(201): R = A/G
gatctttttcctaaaagagggagaggaaggaaaagtaagaagaaaagaaagcagcatgtagttcttttttttcccctttccctttaaccaaacccttatttacttgtgttctttaaaagctattattagtgttatttattattagccatcagaaatttaaaaatttaacatatactcagagacagcaaatatgtattaccrtctgagaatttggttcctcttctccccactggtgttttggagaattctgcatcatgaaagaagaaaaatcattcataatctcattccacttaatccaattaactttattattaagataataaagtattattatcttattataaataatatatttatataataaaatatattttattatatattatatttatattatatataataaatatttattatataatatataatatgtaacttataaataagtattaagataataaaacttaattctaactgaacaaactctcacacttctcagttataatgagcgcaaaaattctgaatacaagagtgccattgtaaataattttattacac

SEQ ID NO: 294 - DNA, 801 bp, Homo sapiens
  misc_feature (401)..(401): R = A/G
atgtggttaatgccatggacagaagaaggcagcaggtggcagaatggggtgcatgaaggtttctgaaaattaacactgcttgtgtttttaactcaatattttccatgaaaatgcaacaacatgtataatatttttaattaaataaaaatctgtggtggtcgttttccggagttgtctttatcatccttgcatttgaatattgtgttcaaatttttgattgattcattcagtatctggtggagtctccaatattagaaatactggaaacaaactgaaaaaccacaaaaggacaaataatgcttcatgagtcagctttgcaccagccattacctgcaagtcattcttggaaggtatccatcctctttccttttgatttcttcaccactatttgggatataacrtgggttaacacagacatagcagtcctttataaatcaattggcatgctgtttaacacaggttcttcacctcccctttcttaccgcctgctttctcagctcaactatcacaggcattacagttgtcatggcaaccccaatgttggcaaccacgtcccttgcagccattttgatctgccttcctgaaatatagagcttttccctgtggcttccaaatgaactattttgcaaatgtggggaaaacacacacctgtggtcctatgttgctatcagctggcacacctaggcctggcacactaagccctctgtgattcttgcttaaccaatgtatagtctcagcacatttggtttccacttaaggtttcctatttttgacctccacatcctgttattgtcttttgca

SEQ ID NO: 295 - DNA, 801 bp, Homo sapiens
  misc_feature (401)..(401): R = A/G
tacagttacctgccaccatgcccagctaatttttgtatttttagaagagacagggtttcaccattttggtcaggctggtcttgaactcctgaccttgtgatccgcccgccttggcctcccaaagtgctgggattacaggcgtgagccaccgctcccggcctgtgactttttctttgacattattgataatgtaaaccttgggagttaaaagtgcagggacaatcactaataggtcagagattctttgactcaagtattgaaacagattcccagaatattggcaaagtctctagctgtttgatgagtgagatgaactcagactgaatcttggcatccctccctccgtggttttcacaggaaatcttcattttgactcattattactcaccactttgcttacrtcgtgcccatcttgttaacaaaatagccaggatggcaagtcccagtagagtcaggatgacagccaaagttatttctgaaaacaaaaactcacctgtaaacatgcttatttagaccaggaaattaccagaaacaacttctgatcacctcttactatccaccagatagactttttttctttcccctttctgctacttcaactcctttattcttttatttgccgcatattactgtcctcacattcccgcccctgcccatttttagctcttacattggttctttggtcgtatactaagaacctcagatgctgtgtacccttggtttagagttggaaatctgacagatttcctcctcagttgaaccctttactccccaggcaggaagaatgttaaagggaatcag

SEQ ID NO: 296 - DNA, 801 bp, Homo sapiens
  misc_feature (401)..(401): Y = C/T
ggtcgtgagcacagggccagcagggcagaggccagcagctccagaagatgcagggtcaggttggtggagatctgcagacactcttctgggccccccaagtaccgggagggagctcctggttccccccgcagccagcccaacagcttctcacgcctaccaggtttctccaatggggctcctggcccagggacgctcagtcccccttcaggggacacccctggtctcctggtgccacctgaatccacatgatcccatctgagtttgggactggcccctccagcctccagtctcccagactcttgagtgctagagataggctggtcccacttgagggaatccattcttttgctccctagctgctcaacttggggctcctccttgcttggttcggaagcagcccyagaaaccctcaatgcccccgagtccttagtcttgggatgccccacatcttccatggtttctggggcactatcccagtcacttcctgaattctccgaggagctgtccacccgtctgggttctgggtaaggcgggtcaggcctcattggtttccggcggccccaagggcgaggtagccagccaccaagccgtcgcaggaacatggctggggtgtgtaatgggcccccaaattctgaggctgcttcctggcactactcagactctcaggatctcctcagaagccagagtctttctggctcagaacaggtatttgcctggtgatgcagtcctactctgaattcagaagtggctcctcccttctctgaatagtcatgcagcctcaagtgtggcaagtagtttgct

SEQ ID NO: 297 - DNA, 801 bp, Homo sapiens
  misc_feature (401)..(401): Y = C/T
ttcaggcgtcagaggtgctctgagagcatttcaggggtttcccagttgagaagctgatgggggtgttactcaatggaccatttccacacagtagagggaattgtaaggggtggtgatctggctgaggggcactgtggtggaatgggaatttaaacagtaggagagaatcaagagaggagctttgaatctaccattttgagaagaggaaggaggaaggggtgataagagagagtctgcaaccttggggtagtggagaaagcagaaccactcttttgggaaggagggaaactgagctaaccctatgcctgggcactggacttctcccatatgggatatagtgtatgtgcttgtttgtgcccaaggcatgcacacacacaacagttgacttcttatggactgtygagtaactctccttggggtaggaaaacttcagggtcagctagctggggccccagaggcttcacttgggctaggatatcccggatggagcggcaggggatctttccagcactgctggagccacagggcttggcaccagcggagggatcaggatggggagagccatcggggcccccagtcagtgtcaaggaggagacagacatgcaagggtgaccagaagagctggacttgctgccacaaggctgaaggatgattttgccactggattgggaactggagctgctgctgaaggagccggtgcctggtggggagcaggggctctgggaagcactgccgcagggatggtagggtaaaccggagctgctggaaatgctagaactgctggggactcgagaactggag

SEQ ID NO: 298 - DNA, 801 bp, Homo sapiens
  misc_feature (401)..(401): Y = C/T
accattgctacaggggggaccttgaaccactccaggggcaccagaaccgtgctggtccaccaccaccaccacaggcctctgaccccctgacacagagtgggagctggggatgtaggggccagagtgcgagacgatgggccctccactgcagggagagtcggggatgtccgaactacagggacgctggttggagctgacgctttggccactgctggataccccagaggtttgggaagaggaagagctttgtccaggctgggaagggtttagtattccgcggtaagagttgtcattggttggcagagcagagccattccctacttggaagctgctgctgctgaactgaaagctgctgctgctgctcgaatgagagctgctgcttcccgagtgagagccgctgyttcccgagtgagagctgctgctccccagctgggaggaaccggatgcaccttgtagactagagccagatccggaggagtagctgacctgggaataccccgttcctggcttaaaagatcctgcagaaccaccctgggcaatgctggatccgctggagctaccactggagccaccaccagagcttctggcactggaaatggagctgccagaactgctggagccactgtagctactgaagccgctggagtcacccttcccagtgaggcaggggtcgttaggggaggtgatacgcgtggggtccttacaggggtctgagaaggtgccaatgctcttagccaaggtccctgtggaggaaagcagtggttagtaagggccaaagaggcttggcttcctccctcacct

SEQ ID NO: 299 - DNA, 801 bp, Homo sapiens
  misc_feature (401)..(401): N = A/C/G/T
ataaaaagacagctgttttcaaagtgggcttgaagatgtcaagatctaggtatctagaaaatgcacttacatggactgcctcattcccccaacatgccataaaataatagtagctaatatttgcttaaggcttattatgtaccaagtaccattttaaatgctttcatctttatgatatggttattagcacctgcggggagggaggttaaaattgggctaaacagagtgaggcatcctgggacatcccaacatgttctggcagcttcaagctttggtacctcgtctgcaaacagtgggctaacaccatgttcccaggcagtaaagctcccctaaggcagttcctcagtctgttcgttcttatttacatcctagaagtcagaggcctcaccagggtgtggacntcttgtgctctgctggatctactgtgtacgcaccattcactggaatgattgtgggccaggagaaaccttatcaaaacaagaatgctatcaataatggtgttcgaatatctggaagaggtaagagaggtggagtctacacctggggtgcctcctggagatgttgatgctcatttatttaatgcaggttccatacgtagagattttgtacttctttcaaaatgataaaacctggaacagaaagaatatagagtgtacccaaactagctgatgcattttttaaaaaacttttattttaggttcaggggtacatgtgcacatttgttatataggtaaaccacatgtcacagacatttggtgtacagattattttgtcacccaggtaataagcatagtacccgat

SEQ ID NO: 300 - DNA, 601 bp, Homo sapiens
  misc_feature (301)..(301): Y = C/T
tcagcactcagtacatgttccctgtcaggaaggcagggaggcctcactggcagcatcaggacatgggacatcaggacatacaccgtggctctcagggaaaggaaagagaccctctcccaggtgtacaagctcgattctaaacctcatgggaccctgcattgttcgctccctcattcattcactagtccatgcgtgtactcagtagtggcataagcagactgctcgggtcggacctgaattagcctcacccactctcctcctacactgtccctccccagggcacattcgcctcccaggtgaygctggagggggacaagttgaaagtggagcgggagatcgatgggggcctggagaccctgcgcctgaagctgccagctgtggtgacagctgacctgaggctcaacgagccccgctacgccacgctgcccaacatcatggtgagcccctggccagcgggcactgagggcctgggggtggcaagcacattgccagcccagtgccccccggtggtcgcacgtggggagggaaggatccaaaggaggtctcgtgcacaggaagccgtcacctggagtttggctgatagagagagtttgctgggtca

SEQ ID NO: 301 - DNA, 801 bp, Homo sapiens
  misc_feature (401)..(401): Y = C/T
attaaaaacaagtaatttcaagagtttcaaggtatgccactaagtttcctataagtgttacagaatattagtattggtaatttcattccaaaagcaaataaatgcctatgactatatgcttagtgtattttatacgtaaaaattttagcatatgatttttatgctatgaatttacaaataaacctttcctgattatttaaatcatctcagacaaaaggttatctatgtctaaagaaatgactttgagtactaaaatgtaatcacattaaaatattttttttctgacctccttaaagcttcttgccagccctggtcatgcagtggccatggagaatgtgtagaaatcatcaataattacacctgcaactgtgatgtggggtactatgggccccagtgtcagyttggtaagtctctttcctttctttgcttcttcttaggtaaagtcacaggaatcattatagcttatcatgaagctggttggaacaaaatgatactagccactctgagaaatgggaagttttgatcagaaagctctgctttcacaatattgttacctttccgtaaagatttcataagtcagcatgaagtttcgactcacttctcaacaagtctttttgagtaccacaagaagcacagtgttgggataaaagctgtcagggttaccataaggaattagcatggtagattcccgctctcaagaagctcacgatctaatgagcttgttagattaattagaactctaaggtctggaagaaactatgccatttatcattaggaggctgagttacccagaaagtatct

SEQ ID NO: 302 - DNA, 801 bp, Homo sapiens
  misc_feature (401)..(401): R = A/G
gggctccctggggctggagggcacagccagtggtcacttcaagtcttgaagtgtctcagaagctccagaagcaaagagtccattgaggaacatgctggcaattctgtgacattccctgtcagaaaactctatagacctactcctgaactgaacatttgatggtgtgtctctctggtgccatcttaataccctttctcctttttctgtgcagaatttaaatgtgagtttcaatcctgaaagtttcctggactgccagattcatagggtggatgacattcaagctagagatgaagtggaaggttttctgcaagatacgtttcctcagcaactagaagaatctgagaagcagaggcttggaggggatgtgcagagccccaactgcccatctgaggatgtagtcrtcactccagaaagctttggaagagattcatccctcacatgcctggctgggaatgtcagtgcatgtgacgcccctattctctcctcttccaggtccctagactgcagggagagtggcaagaatgggcctcatgtgtaccaggacctcctgcttagccttgggactacaaacagcacgctgccccctccattttctctccaatctggaatcctgacattgaacccagttgctcagggtcagcccattcttacttccctgggatcaaatcaagaagaagcatatgtcaccatgtccagcttctaccaaaaccagtgaagtgtaagaaacccagactgaacttaccgtgagcgacaaagatgatttaaaagggaagtctagagttcctagtctccctcacagca

SEQ ID NO: 303 - DNA, 601 bp, Homo sapiens
  misc_feature (301)..(301): R = A/G
gggctccaggctgggacccctccgtggggagctctgcggcaccacgctttgtgaatgggccctggggggaggttccgctgcctggggccccgatgcggggagccgcccttgaggcccccggagccacggaatagctgtcgcagggcgtggaacccgtgggcagccgcaggtgtgctcttgggggccaggacgccaggggcttccgaggtgttcacacctgcaaaccgccccgacctggcccccagactccttcctccgatttttggaaagaagtgcagctggcgctgccgcggaaggtgcrgtacaggcctgtggaaggagacccccagacgcagctgcaggacgacaaggaccccatgctgattcttcgaggccgagtccctgagggccgggccctggactcagaggtggacccggaccctgagggcgacctgggtatgcccgcccagccccactccccaactggagaagctcagcacagggcggagtgggggcaggcacagggcacagggcctggaggggctccaggtgttgaggactcttcccggcaccgggagcccctgcacggcctctgccctggaggtgctcggccctcggtctg

SEQ ID NO: 304 - DNA, 801 bp, Homo sapiens
  misc_feature (401)..(401): M = A/C
tgaagcccaagtctcttcccctcttcatgaagaagccaggggtctggtcttctaggtaagcacagccatgtggccctggctgccaatccctgcggagcatcttcttggaagagtgacctggggcaagtgacttaccctctgtgggcctcaggaccctctgtcccccatgccgtactctgagcccttagtattccagtgagagggaaaagggctttgggggtcttgaagagactgagacctctcaactcccgctccctgcccccaccagcctccgctaccacaacctgcacccagactacatccatgggcggctgcagagcctggggaagaacttcgccttgcgggtcctgcttgtccaggtggatgtggtaagcaggggctgctccctagccagcctcacmgggctttgaggttgtgcagtgggctgttgaatcccttccaagaggaaatgcagctaaaacctcagcgaggaacgtttttcacatctgagatgacatgggtcaccaagacattatgttggcaaggagaggggagggcaaaattgtctatttcctctttccccacatccccttcaattagtcccagatctctgccacctaaatatctcttctttttgttttgtgtttgtttgtttgtttgtttgagacggagtttcgctcttgttgcccaggctggagtgcaatgacttgatcttggctcactgcagccttcacctctggggttcaagcgattctcctgcctcagccttctgagtagctgggattataggcatgcaccaccacgcccggctgatttttgtat

SEQ ID NO: 305 - DNA, 601 bp, Homo sapiens
  misc_feature (301)..(301): Y = C/T
gaatagaaaataaggctaaaaaaaaagaaacccacaaggttaatgtatactaagtagccaatgtccaagatagtgattctggggactagcttgggtgagaacagtgggaggaggtcatagtggatagaaataggaaaaaaaactaactttatagaattatatctatggcaaataaaagagagaatatgatgaaaaaagtactcagacagccaccgtccttgttgattgataggcccttttgggtactgtcactcacccagagttttaggagtcactgtccaagacaaggtttgtctctcayttccacagatacaataggattcttctccctttgtattttgggaagctaggaaggctggagaggctttcagctgcacactgacctatcaccccatgtgaggcagagacagaaatgatcagaatatggaacgacatgaacacatagaattggggccaagtgtgagatgctgcagtaaattgggatttgtaagaaaaatgtatgtcacatagattcatccatgctttaagaagcatggcaatggcaatgatacaaatcaagattggttgtgtattaggaggatttggcatttgccttagggta

SEQ ID NO: 306 - DNA, 601 bp, Homo sapiens
  misc_feature (301)..(301): N = A/C/G/T
gcagagaactatcactggaagataattccactatattttccccataacttttatcttcttcagttcctgatgctacatccaactcataattctcagtgacatttgtttcattcccatctgtatggaggcaattacctgaagagcactgttctgtctttagaagctctttttctctacagctctgctcacagtgtggtacagtactggatgctgcaaaagaatctacagtaagaattctctgcttatccaagtaagattttgaagattctccctcactatctgtcactgcagcggctgatanctgaggaatactgtactttttacttgctatcaaagttaggtttaatgggcccataaggaagtttcctgtaataatgttttgtttgggtctctcaataggatctgtccactttacttccaggtttcttttacaatcagataaaataaggttaccttgttggtagagatcatttaaaaagtgcttcacatttgaatctaagactgatataagtacgtcagttttcgcctttgtgtgacctatgcaagttgcatcacaatcgttgcctgtactagaatttatgttttcttttatgcaacttaa

SEQ ID NO: 307 - DNA, 601 bp, Homo sapiens
  misc_feature (301)..(301): N = A/C/G/T
tccaactcataattctcagtgacatttgtttcattcccatctgtatggaggcaattacctgaagagcactgttctgtctttagaagctctttttctctacagctctgctcacagtgtggtacagtactggatgctgcaaaagaatctacagtaagaattctctgcttatccaagtaagattttgaagattctccctcactatctgtcactgcagcggctgataactgaggaatactgtactttttacttgctatcaaagttaggtttaatgggcccataaggaagtttcctgtaataatgntttgtttgggtctctcaataggatctgtccactttacttccaggtttcttttacaatcagataaaataaggttaccttgttggtagagatcatttaaaaagtgcttcacatttgaatctaagactgatataagtacgtcagttttcgcctttgtgtgacctatgcaagttgcatcacaatcgttgcctgtactagaatttatgttttcttttatgcaacttaaagatacagaattactttcatttattacttcattagcgtcacaactgttttctttagttgcatctttaacattatgat

SEQ ID NO: 308 - DNA, 501 bp, Homo sapiens
  misc_feature (251)..(251): N = A/C/G/T
gggtgactttttgagacactgctagccatacttttcctagaaaggcattttttctctccacttgttttataagacttgtgctttgacacatgggttaatgatttagaaatatcagcttttggagctcttttctttctccgtttgtcatattttctttttgacgaaaaatgcttagtagaataatattttctttgagacacagaactataaccttgaaggtcacaactttcccagaaattattgcatattantgcatatgattttggtaatgggccctttctttcttctcctactttagttataagctgcaaagatgtgtgaactcttctatgagctttttttaagtgaacaactgctttgtctagttttctggaaagacatttgcttttacataaagatgcttcatcacttaggatatttaggacactcttaatgtgcttttctgactgtgaaaatgttttaattcgtccttgggataatgaagagaaacactcagatgag

SEQ ID NO: 309 - DNA, 601 bp, Homo sapiens
  misc_feature (301)..(301): N = A/C/G/T
aagactgcgagtcctgaaaaatgtgactactgtactcttttgtataagcattaccggactcctgttgggctctctgagccttctcctcactgtggttttggttctcaacctctgacactacatttgacacagaaattgggaaggaaaaattaccttggtccttacattgccctgccatggtaactttattgggaggtatacagtcatagtcctcagagcccatgttgtgagcccaagattgtgaatcattaacagaagttttaaagcaaggggtatccaaaccattagtaagaacagcacnatcaccagggacaacttctgaggaggaggcagaattagatggtgtcgattttatttctgaattaacattatctgaactcttctcaaattgcaaaacctcatttaagcctgcagtactactctgttctcccatactttcttctctcctcatcagtcttgggtctttgatggattttgaagtagtgactgtgcttgagccagtattgttgtgaagaggaaaagaagcattaagaccacttaaaatatttttaagacttgtccaatttaacaaaaggtcaccattaacactgtctttggcatc

SEQ ID NO: 310 - DNA, 801 bp, Homo sapiens
  misc_feature (401)..(401): R = A/G
tctcaaactcacccataatccacctgactcctgcaggttccccactgctccagtgcatccttccgtcccttttgttttctgcactgccagcatgatacacacagtatgctgatattccttcccatgtctgagtcaggtgaggcagaatctagtctctctgtcagacactgaacatgccattgtcatgggttgaagttccacttttttctttcttttttagagagcagctctaaattgggaagcaatgccggaaacaagtctcttaaaaatcaacttggattaacctttcagttacatctgagtgaactgcagctatttcaagctgaaaggaatatttctggatgtaaacatgtcgaaaaacctatcaacaattccttagtttcaccacttcaaaaaatttrttctagtgtcaaatcccacattttaaataaatacagaaatgattttgatgattctccatttctcccacaagaacaaaaagcacaaataagggaaaaaccgtgtgaatgtaatgagcatggcaaagcctttagagtgtcttcaagacttgctaacaatcaagtaatccacactgcagataacccttacaaatgtaatgaatgtgacaaggtcttcagtaacagttcaaaccttgtacaacatcaaagaattcatactggagagaagccttacaagtgtcatgaatgtggcaagctcttcaatcgaatttcactccttgcacgacatcagagaatacatactggagagaaaccttacaaatgtcatgagtgtggcaaagtcttcactcaaaattctcacctt

SEQ ID NO: 311 - DNA, 701 bp, Homo sapiens
  misc_feature (501)..(501): Y = C/T
gaggttcctgttcacacatcgaggatctgctccaaaccccaggagcctgttctttcctaagtgtggcagagaatgctacgtgccctccaagattattttttccttcatacacagtaactagtctcctctgtggcgaggtgtggccatgtgcctatattctggacaaggatttgtgcaacgtctagattaaagggaaggagtgatcctttagcttccctaccttgccccgaccagctggctagaatacggacaggagggcaggagctggaattgccaaactgcgcctcaagatgggagccagttttaaaaatggcaggacacatctgcataagaatgggtccctgccatgccagatttggtctacctacctgggagaaaataaaatctctcgtttaagccactccctatcttgactatatctgagctaccccataccctttccattttcccaccctcctgccttggggcagggtccatttggttacccaggaagttgaaagygatggaaacactgagctggaagagctgctgaatggaagtcacagcctcctcaagggaaagagtttttgatttatcttgttcctgggaaagaaatataaaagactcaccaagggatggtttaccaggattgccacctgcccaagagaatgttatggggatccaggtggccaaatctggataataccttttcaccagtgggc

SEQ ID NO: 312 - DNA, 630 bp, Homo sapiens
  misc_feature (39)..(39): Y = C/T
aaatgaaacaaatggccatgaagcactcatgacaaaaaycaaaaagttgatgagtagtacagagcgacatgatcaaaggcatgctggaaacaaacctattaaaaatgagcttggatcaagctttcattcgcatctgcctgaagtgcacatatttcaccccgaagggaaaattggtaatcaagttgagaaggctatcaacgatgctttctcagtttcagcatcccaacgaatttcctgtaggccaaaaactcgtatttctaataagtataggaataatttcctccagtcttcattactcacacaaaaacgggaagtacacacaagagaaaaatctttccaacgtaatgagagtggcaaagcctttaatggtagctcactcttaaaaaaacatcagataatccatttaggagataaacagtataaatgtgatgtatgcggcaaggactttcatcagaagcgataccttgcatgccatagatgtcacactggtgagaatccttacaagtgtaatgagtgtggcaagacattcagtcacaattcagccctgttagttcacaaggcaattcatactggagagaaaccttacaagtgtaatgaatgtggcaaggtttttaatcaacaatcaaacct

SEQ ID NO: 313 - DNA, 601 bp, Homo sapiens
  misc_feature (301)..(301): Y = C/T
catcactcgtgtggtaagtaaaattgctgctcagaacacttccatgcctgctcctttgtgattcagatgaggagaaatcaacgtggactgagcgcccacacaggacagccaggcatttcccatacaggtggtaaaggtatcttctgaacttctccccagcaaatgcatagatgagaggattcaggcaacaatggctaaatgcaaccgtctcagtcacactgagggccagcctcagatccttcctcatgtcacaactgggaaagaagtcatagagcttaagcgtctccaggaaaatcataaygttgtagggtgtccagaagaggaaaaacacgatgaccaccagaaggatcagtttaatggctttggctttcttgtggttcttgcaggaaaacagcgtctggatgattctgaagtagcaataactcataatgagcagggggagtaggaagccaagaaaatttgtttccacattgcggagcacgggccagatttcctggaggacctcggggtagtcaccaaggcattcattttctttctgctttgtgaacatgaactggggtgctgccaccaaaatggctgctgcccagacgcctaggctgat

SEQ ID NO: 314 - DNA, 501 bp, Homo sapiens
  misc_feature (251)..(251): R = A/G
ggttatgacttaaattaatggtgctctgctgggacaagatagggaggagacggggtgagatgatgttaatgctgttggcagccagattgaggtagattcccttaagatggctaagagaatcaatgctgtcgcatgtcaggctgttgtggcttaagtctacatggctcatttttcccaagctgtggaatgcttgctggtctatagagaggagaccacaagaggacaaaatcagaacctccaagctgcccacrgtctgaagtaggttggtcttcgtgatagtcccatcttgaaagtgattcccttttaagttgagatgccggagaactggtaggcctgctagaagatgctgattgctggtatcaaggaagcagtaagtgagattcagaacctgaaggaaatggaggttttggaagggactttgtggagcattaatgtgtaagcgggtaaatgccaaatcgaggagttctagctgaggacattctttgaatgcctgactctgga

SEQ ID NO: 315 - DNA, 601 bp, Homo sapiens
  misc_feature (301)..(301): N = A/C/G/T
cagcccatctacctctggccctggcaccccaccctaccccacccccagtacctgtatcttggttgatgctgaaggctgcgagtccagtgccagcacgcaggaagtactggagctccccatccaagccactgtcatcgtcctgggcagccactacaatcacctgagttcccgaggggctgttctcctgcacctggccctggtgcacgaaggaggcaaagtggggagggtggagattctcattcacatccaggacgatcacctccacatggcagagagtcctgcgggctaggggcctcccacnatcactggcccacaggctcagattgtacccagctcgcctctcaaagtccagctctctctccagaatgagcgcccctgtcatcaggtccacccggaaggtcccatgggcgccatccatcagaacatatcgcacttcacctgcggggcccaggtcaggatcagaggcatccagaaatgtcaagacagtcccggggggcaggtcctctggaaccttcaacctgttgtgttctgtgatgcactggggagagttgtcgttgacatcctccaatgtgattatcaggtcagtgacagagaagagctg

SEQ ID NO: 316 - DNA, 601 bp, Homo sapiens
  misc_feature (301)..(301): N = A/C/G/T
ccctctgcctgcggacccagaagaagctggcaggtaccagagatgagcaatccagagaccaggaggttaaggaagcatttattgaaaacctgtgatgtacctctggcccagaccaagaggcagagtcaagccaaggcttcaatcagtcacaggagactggggatcttgggcctgacccctactcctcaccagtagacttagctgtatcaaaatagctcctttatttcctgaaagccccttgggctaaggtcggggtggagtgtgtcctcctggcctatgaggacatcaggccctgcttggngtgcagctccaggtctttctccttttaggggcttgggactggcctgcaggaggttagtgtccagggtgggaatttacacccatccccatggccacatggtcccctcctgccccatcaccaccttgggtggacccagtatgggaaaggccctccccatagaccatcctctgaggagtcccaggaccccctcccttgtcctcccgccccttccgctgtcccttcagtagctgtttctgttccctgatgcccacttctggggcttaccacatctcctgggccagcctcttcctcttgtgtgct

SEQ ID NO: 317 - DNA, 602 bp, Homo sapiens
  misc_feature (4)..(4): n is a, c, g, or t
  misc_feature (301)..(301): R = A/G
  misc_feature (399)..(399): n is a, c, g, or t
atcnaaaaaaaaaaaaaaacgtcctgatcccagagyctcttcacgcgtcccctaccacagcacttcagagaagcaggtctttaatcagtgtgtctagatgcagctgctgactgtcacccctaccccgcctctctcccagtctgcggacggccagtcacccccattgcccagaatcagacgaccctcggttcttccagagccaagctgggcaacttcccctggcaagccttcaccagtatccacggccgtgggggcggggccctgctgggggacagatggatcctcactgctgcccacaccrtctaccccaaggacagtgtttctctcaggaagaaccagagtgtgaatgtgttcttgggccacacagccatagatgagatgctgaaactggggaaccanccctgtccaccgtgtcgttgtgcaccccgactaccgtcagaatgagtcccataactttagcggggacatcgccctcctggagctgcagcacagcatccccctgggccccaacgtcctcccggtctgtctgcccgataatgagaccctctaccgcagcggcttgttgggctacgtcagtgggtttggcatggagatgggctggc

SEQ ID NO: 318 - DNA, 801 bp, Homo sapiens
  misc_feature (401)..(401): Y = C/T
caggcagaaagtgggagacagaatcaatgggatgccaattgagagcacttcatgggatggggtcttgaactcagagagatagaatgtctgagtctggatgttggcagctgaagagcctcaggcacctacagcctccccctgtgggttggtgtctgcccatgaaatgaggacccagaagggccctccaagcggttttgatgacttccgtctcctacagatgctgctgtaatggaccaagagcctgcgggggacagaacagtgaataggcaggtaggtcctcctcggcccagcctcacggatacagtcttatccctaatagtcctgaaaaatgtgagcaccctccctcactcagcatttccctctctccaggactctgatgaacaagaccctcaggaggtgaygtacgcacagttggatcactgcgttttcatacagagaaaaatcagtcgcccttctcagaggcccaagacacccctaacagataccagcgtgtacacggaacttccaaatgctgagcccagatccaaagttgtctcctgcccacgagcaccacagtcaggtcttgagggggttttctagggagacaacagccctgtctcaaaaccaggttgccagatccaatgaaccagcagctggaatctgaaggcatcagtctgcatcttaggggatcgctcttcctcacaccacgaatctgaacatgcctctctcttgcttacaaatgcctaaggtcgccactgcctgctgcagagaaaacacactcctttgcttagcccacaagtatctatttcacttgacccctgc

SEQ ID NO: 319 - DNA, 801 bp, Homo sapiens
  misc_feature (401)..(401): R = A/G
gtccaagtcattgatcgtggttctcatagtttgagagagaagttctgagagcaaaaagcctggacaggatgatattatgtcattgaggcctaaccatcatcactctagaacactttttctgtattaaagcatattataagtttcaaagagctgacttacaagtaatggattaataactaactttactaactttacccatttgaagactggcatgctgaacaacccaatatcatttcattctgagcaagaatatcattcccagaaaaaaccaggaggatttgtatcacaacgtaccctttcatttacttgatttatttgtgttttcaggcccgtggtcgagccagagctgatgagagcacctacgtcctggttgctcacagtggttcaggagttatcgaacrtgagacagttaatgatttccgagagaagatgatgtataaagctatacattgtgttcaaaatatgaaaccagaggagtatgctcataaggtattgttggtcacctctgaatttgattttcatttaaaaatggcggcatgtggttgccattgatatctctgtgactcattctccagacaaaaattgtgctgaattataagtttctgtttagtgaactgtgcttaatccagattcacatgcagagaatcaagatccatggtgggcaggaaattatcagggagccattcctcattccagtaaaaccaaccataaatttggataatataaatttagcctgccttgttccagaaagactgctgcaactcactgattcaatccaacatggtaattttggtttgatcc

SEQ ID NO: 320 - DNA, 801 bp, Homo sapiens
  misc_feature (401)..(401): N = A/C/G/T
cagtgagtgtcaggaaggaagggctcagtgaggaggtcacaccaggacagaggggagtggggaggagctgcagagctaaaccggtacctgatcctccagaaaacagccaagactcacagtgcttgcaggtttatctgttgtaaataacaatccatgagcatccccactgcagtaccgcagagatgtgggatgacagaagtgcacagggagggaatggccagtgccatggccctgaggctgtactgtagctggtgtgcacagaggggcagagttgttggaagtgaggcatagtgagtaagtatgaaacaagatccagatagccttctttgaggcatgggggaaagccaagaggagtggacaggcctcttttctgcccctcagatgccagagcggctggcaanggagatttgtgccctggacagcagcaaggagcagctgctcaaggaaggtgagaccagggaaggtggatggcccatatctgacctcacgtgccttcatgtgctcacctgcccctttgtgctgcagagaagctggtcaaggcgacactggaagacgtgaagcatcagctgtgctccctgtgtggggctgagggcccctccacccttgatgagggactctttctccgcagccaggaggctgcagccacagtgtaagatgtggaggggaagagggtgggaggagggagtggccggtgctgaccaccccctactgggccccccaggcagctgtttcaggaagagcacaggaaggctgaggagctcctagcagctgctgcccagcgccaccagcagctgcagcaga

SEQ ID NO: 321 - DNA, 601 bp, Homo sapiens
  misc_feature (301)..(301): D = A/G/T
cccactgagcttgtgaagtgccggctacagaccatgtatgaaatggagatgtcagggaagatagcaaaaagccataatacaatttggtctgtcgtgaagggtatccttaaaaaggatggccccttgggcttctaccatggactctcgagtactctacttcaagaagtaccgggttatttctttttctttggtggctatgaactgagccgatcgttttttgcgtcagggagatcaaaagatgaactaggccctgtccatttgatgttaagtggtggagttgctggaatttgcctgtggcttdtcgtgttcccagtggattgtattaaatccagaattcaagttctttccatgtatgggaaacaggcaggatttattggtaccctcttaagtgttgtgagaaatgaaggaatagtagccttatattctggactgaaagctactatgattcgagcaatccctgccaatggggcactgtttgtggcctacgaatacagcaggaagatgatgatgaaacagttggaagcatactgaagtgtcttggtgaacctggatccgagtccatgagtttgaggactacagttcatcacagggttcagcagag

SEQ ID NO: 322 - DNA, 801 bp, Homo sapiens
  misc_feature (401)..(401): Y = C/T
gcctcactcttcttttcttggacctcttgttcctttggcacatctgcctcagtcttctctacttggccttcttgtccttttggtaccttcaactcactcttctctacctgggcttcctgtcctttcagtacaactgactccctcttctttacctgggcttcctgtccctttgagacaccagactgactcttctttacttgggattcctgtcttcttggcacacccatctcactcttctctacctgggcttcctgtcctttcagtacaaccaacccactcttcgttacttgggcttcttgtccttttgggacacctgactcactcttctttacttgggactcctgtcctcttggtacatctgacacacttttctttatttgggctccctgtccttgtggtayactcatctcactgatttttagttgggtttcctgtctttttggtattccagcgtcactgtctaccttgacctccattcctattttgtctttctctaaatcagtgccttttccttctctttctggctcctttatgtgtgctgatttcaaggattctacagaattcgtaaatatgatgtcattctttagtgcttccttgttttcttctcggctattctgagaccttgcagtgcctccacattttagaatctggattttggaacaagatttttttgcaagttcttcatccatgtaacctgttaatataactgagcatacaacaaaagggcgtgatttagatatcaagtattttctctttatttctatttttttccccttgatactggttccttttttgtcttaa

SEQ ID NO: 323 - DNA, 601 bp, Homo sapiens
  misc_feature (301)..(301): M = A/C
gacaggatttcgccttgttagccaggcgggtctccaactcccgayctcaggtgatctgcctgcctcggcctcccaaagcgctgggattacagacgtgagccacggtgcctggcttcagtaaggactcttgaagccactgtactgcccttcactcttyggaaactctttcyggatcctccagcggcagcagctgggcaggwtggcaaagtcagccatgtcctgggagccraagcgccaggtggcgtagcacctgtaggcacagtgccgcagcyggctgttggtggaatccacatccagcgcmagcaagggctcctggtagagcaggaggaactgcaggaystgtctggacaggaccagcttcctgaacagctctgaggtggtgatgcaggcccccggctttttccggcagcacagckcctccaggcacctgtggctctcagggagttgagatgggaggcagcttccacactggcaccagacrgggctatccctggatctaggagtcgcctcctttctaagcagcygtatctcctctggttgtccaggaatcgggggtgtgtcatggagggccaggggcagcctggacaaatctgtgaagtcc

SEQ ID NO: 324 - DNA, 601 bp, Homo sapiens
  misc_feature (301)..(301): K = G/T
cagtaaggactcttgaagccactgtactgcccttcactctttggaaactctttccggatcctccagcggcagcagctgggcaggatggcaaagtcagccatgtcctgggagccgaagcgccaggtggcgtagcacctgtaggcacagtgccgcagccggctgttggtggaatccacatccagcgccagcaagggctcctggtagagcaggaggaactgcaggacgtgtctggacaggaccagcttcctgaacagctctgaggtggtgatgcaggcccccggctttttccggcagcacagckcctccaggcacctgtggctctcagggagttgagatgggaggcagcttccacactggcaccagacggggctatccctggatctaggagtcgcctcctttctaagcagctgtatctcctctggttgtccaggaatcgggggtgtgtcatggagggccaggggcagcctggacaaatctgtgaagtccatcgcaggtctctgaaaaagcaagtttccaaacctattagccatgacaagccctcaggttctaggttctttaattttattaacttataaagttacatttaatattacatgactta

SEQ ID NO: 325 - DNA, 501 bp, Homo sapiens
  misc_feature (251)..(251): R = A/G
aaaggaagtagcatgcaggtgcctgatcagggcctcattatgcagtagctccacacaagacctatgtatgatcaaagacatattgttcataattgccattcttctagaaaatttcatcagaagatgttctgtttcaaagaacgattgagtgtgacccagcaaaaggcgatcaaattcgtcctgggtccatgaaatggcatacgttgtcagggtgaaaaagttctcttctttgatgtacatattcacctccrgggtgaggaccaccacctggtggcctctcgcatggaggtcccgcaaggcctcccgcatgctgagccagtggctgccatcagtgggcaccaccagcaccttcccactctcagcccagggctggacactgaggagaagcagcagtcctgtggccagctgcggcaggggaacctggagtcctgtggccatctcagcagaagccaccgacagctgactgtccaccccacgttgtgcctcctagaattgtttcct

SEQ ID NO: 326 - DNA, 801 bp, Homo sapiens
  misc_feature (401)..(401): S = C/G
aaggagaatggtacatagtaaaaaaattctgaatacctcatggaattgagcatttgaataatagaatattctagttacttttgatttattctagagttatattttccaatgacttagggcctcattaattatattaggcttttgtggaataaagcctttttataaacttcacgtataaatacaggagatggaggaaattggatcttttttggtgtattttgtttttatttaaatagatttattgagtttttctaacattattaaaagcaggatagtgactgcttagaaattctttatcatctcagattattatgtaaaaagtagccatgttaaggaaaaatggtctctgaaaagccgtatctttcaaaaacacaatgtttttctcctttattttttaaggsaaacagtttcgaatctaaagattatctccaggtttgtcttcgaataagaccatttacacagtcagaaaaagaacttgagtctgaggtttgtgttgaatttaatagaattttaatattttactttcatttaaaatggcaaaatactagtttttatttattgggggtatgttttctagggctgtgtgcatattctggattcacagactgttgtgctgaaagagcctcaatgcatccttggtcggttaagtgaaaaaagctcagggcagatggcacagaaattcagtttttccaaggtaaaactgaagtgtttttgttttttgttttaaagataaagagacttggcttaggctaaattgctatataattgtatataatgaactatacattttatgcttatgca

SEQ ID NO: 327 - DNA, 601 bp, Homo sapiens
  misc_feature (301)..(301): W = A/T
tgtgtgtgtgtgtgtgtgtgtgtgtgtatgtaatttttttaaaggcaaaaataagatcatgctgtgcatagtgtgttgccactgattagctttatttaactttaaaatttgaaggaattataaaactgtttgcattattaatcatatttgcattctagttatcctaaagtatattcatgaaacattgctttttcttctttccaaagaaaataattacacagaatcaaagaattaaagaattgataaatataattgatcaaaaagaagatactatcaacgaatttcagaacctaaagtctcwtatggaaaacacatttaaatgcaatgtaagaatttaaccttgtgttatattaataaattagataagcatatgttttggttgaaaggaaataatttaaaatagcttatgcaactaagactaatttattgagaatgttgaattgcttatgcaacattgaactcaatttactgttttccaaatctgaatttttgagaacttagacgagggtgtttgacttctttgaacatacttttccacaagatacgctggcagtgctttgcatgtaaaaaggaggagaatatgtagcctttggacgtttaa

SEQ ID NO: 328 - DNA, 201 bp, Homo sapiens
  misc_feature (101)..(101): R = A/G
gagctcttcaaagctctcaaatgtagaagcaagtaaagaaaatgtgtctcaaccaaaacgagccaaacggaaattatacacaagtgaaatttcatctcctrttgatatatcaggccaagtggtaagctagtatttctgttttcatcaatgtagaactgttcgtgttctttttaattttttacagtggtttgaatttcaatt

SEQ ID NO: 329 - DNA, 801 bp, Homo sapiens
  misc_feature (401)..(401): R = A/G
ttggaaattttagtccatttacattcagtgttattattaagtaaggacttacttctgcctttttgttatttgtttactggttgttttgtgggcttctcttccttctttcatttcttcctgccttcctttattgataataattttctctgcatatatgtgtacagatttttcttaatgcctagcttaaggcacagttacacatttgtgcatctgtagcagtcctctctttaagttacacatacttccagcactataatttaaatttattatgatgtttggataccttcatcatgattcatgtacccctgaattgctagaacaaatgttccatttctctccttttccatcagttcttacttgtgtcttgtcagctaaagtccaggaagagattgaacgtgtcrttggcagaaaccggagcccctgcatgcaggacaggggccacatgccctacacagatgctgtggtgcacgaggtccagagatacatcgacctcatccccaccagcctgccccatgcagtgacctgtgacgttaaattcagaaactacctcattcccaaggtaagtttgtttctcctacactgcaactccatgttcttttattcctcaaattcacagtatgattcttaccctctaccatcactgggtgagagaagtgcattactcctatgtatggcagtttaattggactttctgttgattccagtttgggactataaagatttgtaacaggtcttagtgtctcacagtgtgtgtttttcagatttattctttcttcaagattgttctggctactcttaagt

SEQ ID NO: 330 - DNA, 863 bp, Homo sapiens; identical to SEQ ID NO: 173
  misc_feature (258)..(258): W = A/T

SEQ ID NO: 331 - DNA, 863 bp, Homo sapiens; identical to SEQ ID NO: 173
  misc_feature (319)..(319): K = G/T

SEQ ID NO: 332 - DNA, 601 bp, Homo sapiens
  misc_feature (301)..(301): R = A/G
ctaaagcagaaaatagttttcactcatcatatcactattcagagacaaccaatattgatattttaatctcttatttctgtatatgtattaatacttacacagttgagatcatattgtatatacaaacttccctttgccaattgttttgattttaatgatttttttttgttattctttgcctgctttttttttttaaaagataatagaaatttaacattgttttgcaatgaatttggataccagaatgacatcgacgtggagaaacctttaaattctattcaatatcaaagaagacaagccrtgggtatcccattcatcatacaatgtggtgagtgttgaagtccattataattaccaaatgttaagggttcttaaatatgcaagtcattgtgttaagaaatgagggatgagggagacaaaggtaagacatcttgctttccaggagtttacagtctagaagaaagttataagtgtgaaaataattgtaatacagggaaaaataaggtaagtgatatactagagacaaataattatttgagggttcaaagaaaaggatgggggagtagaggcaagattctatgatggagtagcatttgtgata

SEQ ID NO: 333 - DNA, 801 bp, Homo sapiens
  misc_feature (401)..(401): W = A/T
actgtctggccctgaatttgcatggcttgagaaggcacaccgtaagactaagtaggaaaaatccaagtaaggagtgtttctgagactttgatcacctgaactttctctagcaagtgtaagcagaatggagtgtggttccaagagatccatcaagacaatgggaatggcctgtgccataaaatgtgcttctcttcttcgggatgttgtttgctgtctgatctttgtagactgttcctgtttgctgggagcttctctgctgcttaaattgttcgtcctcccccactccctcctatcgttggtttgtctagaacactcagctgcttctttggtcatccttgttttctaactttatgaactccctctgtgtcactgtatgtgaaaggaaatgcaccaacaaccgwaaactgaacgtgttcttttgtgctcttttataacttgcattacatgttgtaagcatggtccgttctatacctttttctggtcataatgaacactcattttgttagcgagggtggtaaagtgaacaaaaaggggaagtatcaaactactgccatttcagtgagaaaatcctaggtgctactttataataagacatttgttaggccattcttgcattgatataaagaaatacctgagactgggtgatttatatgaaaagaggtttaattggctcacagttctgcaggctgtatgggaagcatggcggcatctgcttctggggacacctcaggagctttactcatggcagaaggcaaagcaaaggcaggcacttcacacagtaaaagcaggagcgagagagag

SEQ ID NO: 334 - DNA, 801 bp, Homo sapiens
  misc_feature (401)..(401): R = A/G
agccgtgctaagttgttatgctgcaaatcgagaatttctagtttctcaagaccctccaacatgtcatcatttatgttggctatgttgttgttgcttagatccagaatggtcaagttacgaagaggctggaatggtgaaggagagctatccacatttttaagggccacccttcggagcatcagtcgttgaaggcttgggaccaaggcaaaggagttcctagtcagctgcaggtacttgttgtaggaaagatagatttcgaaaatattttctagacctctccattcctggcctgtgagttcttgcccaatttcattaaggcccaggtcaagtacttctaggtggcccaaccaagagaaagcatcactctctatttttgagattttattcttggttaggttgartatgtgtaagggagaatgagcaagtgatacaaatgtttcatttgtcaaagttcgcaaacttgtaaaggagttggatagacttaagtatttcaggtttatcaatcctgtgaacatattgctttttatgcctggaatatcattatcttccatgttaaggtgctccaaacattttagccactgaaaagaaaaatcatcaatcttggggagtgaggcaagggaaatactttgtttagtaaaagaccgtttcaaattcaggtacctcacattgaaaagcccgtgcaaagagtgagaaaacaaatgctgtatattattatactctaggaagaaatattctagttgtggaagccaagcaaaggaatcgttaccaaccacatttaagttgttgtaggaaagatcgagc

SEQ ID NO: 335 - DNA, 601 bp, Homo sapiens
  misc_feature (301)..(301): Y = C/T
aagagcattttcctgataggcctccaccatctgtagcctcaacatccacgtcataagactgaatttcctcaaaatccaaagcctttctcagccgaatttctcctgtgattgcgtttatttcgaagggttggttgacgtcatcgacttgaaacagggcgtaagataccttcccaaacgatcctgcatctaaatctctggctgagacggtaataaccagagagccgagggggttgttctcagggacttgtgcttcatagagctcctgagcaaactcggggacgttgtcattgatgtccaaaayctggatctgaatctcggaggtccctgaccggggcggagacccgccatccagcgcgatcagcgttagcctgagttggggctgctcctcgcggtccaacggtttgtctagcaccagctccgggaacttcctgccttcgctgcgattgcgggtgagaacgtggaagtgagggttggagctgattgtgtacctctgaaggccgttgctgccggtgtctaaatcgtgtgccattttcaaaggaaatatctttcctggcatagtaatttctgatattttcaggagcatttctctggcagggaattc

SEQ ID NO: 336 - DNA, 704 bp, Homo sapiens
  misc_feature (201)..(201): Y = C/T
gcatggaaggagccatagcaaatgagaaatagccattcattcaagaggaatgtgactatattttagacatgcctgttgagagaaatacttacaattttgctttacacatggtacactgattgttgtacgatttgccatcagcatcacgtacaggatcactctcccgagtacagctgagtcttccatttttcatttgttccygatactcagcacattcgtcctgaaaacagagaagaacgaagagcccctggattacttagtctactgtattcttagtaaattgttttaacagtctgagtaagagaagttctttcacctctctttataagaaacataacattgccgggtacggtggctcatgcctgtaatcccagcactttgggaggccaagatgggtggatcatgaggtcaggagttcaagaccagcctggacagcatggtgaaacactgtctctactaaaaatacaaaaattagctgggcatggtggcgggtgcctgtaatcccagctacttgggaggctgaggcaggagaatcgtttgaacccaggaggcagaagttgcggtgagccaagattgctccattgcactccagcctgggtgacagggtgagactccatctcaaacaaacaaacaaacaaaaaaacccctaacatctaggtctggcatctgcagagaaaaggggaccagaatcacccatgttgtaa

SEQ ID NO: 337 - DNA, 601 bp, Homo sapiens
  misc_feature (301)..(301): R = A/G
gatttcatttttcatttttaatacaagtagggctggtgaaactattatatttagggaagcaaaggaaaataaaagtattttaatttgtggtactactggcaaacactgaaggcattttaaatgagatctactgaattagtcttgtaaatagtagctgtttcattgtatatttgtcagcgttagtccagatccatattttcaatcacgttactataaaggacttaaatattattgttcttctctatattagtgaagaaatgtcatgttttctttaaggttatcgtgcttttactgaagccartgatggcagtctgtgtcttgctatggaatatggaggtgaaaagtctctaaatgacttaatagaagaacgatataaagccagccaagatccttttccagcagccataattttaaaagttgctttgaatatggcaagagggttaaaggtaactatgtcattatattttaaatgacttctgtttttgttcatattttaaatgaacaaataatcactttgcaggacatctttgaatgtggatggatattgttacttgtcagttccaaaaaggggttagcggaaaacaaaatagaggcttacatt

SEQ ID NO: 338 - DNA, 801 bp, Homo sapiens
  misc_feature (401)..(401): Y = C/T
tccagcttactggcagaggaatagaaaccacacattctcctcatcagcttactgaaggtgacattgtgtttcctcaacctaatccaaaactcagaaggatttttaacaaactctacctgcgcatcgtagaaggcattcatctttaacctgatagatcttaaggctgggagtgaaatctcttcatctacttcttcagcaggagactgagactgagatgtttctggttcctcctcctctgttgcctggctctgaaggactcggtcagccaagcaacacgactgtactccaaacacacggttcagattaatcccatcttctccatacaggctgacataatacacatgctcaaaggagcaataaaattcaatctttgcattcactgccttgcctagtatcagtgycttcaggtcaccgacctgtgaccgagaccagcctctcccaccgtcccagagtccatacaaagcacaagggtaggtcaccaccggcattcgaaaatattcaggcagcaagtaccgaaggctgctgcaactcactaactccttccttccatagtccacatgaagcacctgggcacagcgctggggccgaaaagtctcaagcaacagtgctctgtaccaatgtccatccaggccacaggatgcacacggagagcccggcttatctgggctctcctccctctcctcccaggtggcactggtagagttctcatcccctgtccccgtggaaccccggtatacctgggccatgctctcggagaggcggtggatctcctgcgagacgctgcggagctggcagtgaatg

SEQ ID NO: 339 - DNA, 801 bp, Homo sapiens
  misc_feature (401)..(401): R = A/G
gcatgcctgtaatcccagctactcaggaggctgaggcaggagaatcgcttgaacctgggaggcagaagttgcagtgagccaagatcgcaccactgtactccagcctgggtgagagtgagactctgcctcaaaaaaaaaaaaaaaaaatagtggagcaacaggtctctgagaataagatgtttcccagtgcagggaggtgggctgcagtctgtctgtcctccctgtgaggtggggctcctccctgtgtgggcagtgagagggcacctggtaacacacaggcctgagcagtgtttctcccccacagactggttcaggcagaccctgctgaagaagcccaagaagaggcccaactccccagaaagcacctccagcgatgcttcacagcctacctcacaggacarcccactacccccaagcctcagctcagtcacgtctcccagcctgccacccacacatgcgagtgacagtggcagtagtcgctggagcaaagactatgacgtctgcgtgtgccacagtgaggaagacctggtggccgcccaggacctggtctcctacttggaaggcagcactgccagcctgcgctgcttcctgcaactccgggatgcaaccccaggcggcgctatagtgtccgagctgtgccaggcactgagcagtagtcactgccgggtgctgctcatcacgccgggcttccttcaggacccctggtgcaagtaccagatgctgcaggccctgaccgaggctccaggggccgagggctgcaccatccccctgctgtcgggcctcagcagagctgcctaccca

SEQ ID NO: 340 - DNA, 801 bp, Homo sapiens
  misc_feature (401)..(401): R = A/G
aaaaaaaatagtggagcaacaggtctctgagaataagatgtttcccagtgcagggaggtgggctgcagtctgtctgtcctccctgtgaggtggggctcctccctgtgtgggcagtgagagggcacctggtaacacacaggcctgagcagtgtttctcccccacagactggttcaggcagaccctgctgaagaagcccaagaagaggcccaactccccagaaagcacctccagcgatgcttcacagcctacctcacaggacagcccactacccccaagcctcagctcagtcacgtctcccagcctgccacccacacatgcgagtgacagtggcagtagtcgctggagcaaagactatgacgtctgcgtgtgccacagtgaggaagacctggtggccgcccargacctggtctcctacttggaaggcagcactgccagcctgcgctgcttcctgcaactccgggatgcaaccccaggcggcgctatagtgtccgagctgtgccaggcactgagcagtagtcactgccgggtgctgctcatcacgccgggcttccttcaggacccctggtgcaagtaccagatgctgcaggccctgaccgaggctccaggggccgagggctgcaccatccccctgctgtcgggcctcagcagagctgcctacccacctgagctccgattcatgtactacgtcgatggcaggggccctgatggtggctttcgtcaagtcaaagaagctgtcatgcgttgtaagctactacaggagggagaaggggaacgggattcagctacagtatctgatctac

SEQ ID NO: 341 - DNA, 801 bp, Homo sapiens
  misc_feature (404)..(401): R = A/G
agagagaattgatctctggtctcataatttgagccctctgagtattttgcaacagagactgtggtggcttggataagggggagacagaggtactacacatgttgttcccatcctcctccctcccagggaaaaatgctcacatcatctatcccttttcccctagctcccttacatcaacccacaaatcctcgaagcccggccaacacacagatgtgcaaacacttccgtgcacacatgcaccttttccaacacacacatgcacaggtatagacacgtatctacacagttggctgtagcctaggggtattttaggggatcctcacctgctatcaccaggtgctcttggttttccccttggcgtccatgattcagttcttctgccagggacatttccatctccrccttggtgttgggagggcctcctgccatcacaaccagctgttctcttgtaagctatggctaaggatgcacagggtgccaggaacagaggagtcacactcagaaaatcacctcttccggaaacaggagctcaaggaagatatagtcagatctgggggtggagtgagactccctctctaggctgaggccttggacacagtactttctgtttctattgtatcttgctggctaggtcagtggccttctcctctgctactctgtaagcaacttaggagaagagatacaattccgtgcctttgcctgtgagaactgctctggctcatgaatctccatatttagcccatggggagaagggtggggtccaccctccatcatttctatgaagaaacagggattggcaca

SEQ ID NO: 342 - DNA, 812 bp, Homo sapiens
  misc_feature (315)..(315): N = A/C/G/T
gaaaatcgtgactggttagttcattcagcagatttttattgagcgcatactgtctgccaagtgctattcactccagagacagccactcatcccaagccctgccctcacagagctccccatctagggaaggggagtcctgaggctcccctggatgtgaccaaggcttactctcaacacttagcttctactccatgatgttcttaccaagcaggcagtcttggtttcctctttcgtgtggctgccgcattctgtcttctggagtttgtataggggacacatgtcaagatctttcacgaagattttcctcaggacacncatcgtcatgtgatttcctgtctggaccatgcaacagagagcccagggattattaacgagaaggcagtcccctatgtcaacacaactcccactcatatagccaaacgagagtgagaatttttttttttttttgagttggagtcttgttctgtcacgcaggctggagtacagtggtgtgatcttggctcactgcaacttctgcctttcgggttcaagcaattctcctgcctcagcttccggagtagctgggattataggcatgcaccacaacgcccagctaattttggtatttttaatagagatggagtttcaccatgttggtcaggctggtctcgaactcctgacctcaagtgatccacctgccttggcttccctaagtgctgggattacaggcatgagccgctgtgccctgccaggaatgttcttataaatccctttttttcatagaaataagaacctgtgactgagtttttactgaaaactacctccactttgaa

SEQ ID NO: 343 - DNA, 601 bp, Homo sapiens
  misc_feature (301)..(301): S = C/G
tttacaatgcgtcttgtgccacgtgctatcctccgtccaacccttactggactatgcaagccttactgggtgacccagtgttttacttgacttgcctgatgacgcctgtcgctgcactgctgcccaggtgggtgtcggagcgggatagtgcctctgagccccgagtgagcccagacgacattggcattgcttctgctctgtgtgggtctctggaagctcaaagacaccaccgacaggaatatctaactttttgttttaatgtactttttctagattgtttttcagatccctccaggggagsgttttccccacacaacttcagctggcacgtcagttgaccaggaagtcccccaggagatgcagtgctcccaaagagacctttgctcagggacgcctcccgaaggactcgggaaccgagcactcatcagggaggacagtcaagacctctgtgcccctgtcccagccttcttggcacacacagcagccggtctgctccctggaggccagcggggagcccagcacagtggacatgagcatgccagtgagggagcacaccctgctggaggggctgagcgcaccggcccccatgtcctctgcgcca

SEQ ID NO: 344 - DNA, 601 bp, Homo sapiens
  misc_feature (301)..(301): N = A/C/G/T
gaaataatcttgccatgtgattatcttttcgaaaattaaaaattattgtaaaataattccatggtgaaaactaatcaaaattttaaataaaggcagactgcacccagcactctcatgcctcagtgacctcaggagaagttcccttccgtccttgttctttctgtccgggaagcgggactggggtacccaagtctggggccctacaggcagtgggaggagaagaggcccagttcttggagggtaaaccccaaaacaactccaatccatcctcaggcaaaatgaggcctatatcaggagtgangctaggggcattcgggggagctggagccacagccctggtcttcctgtacttctgcatcatcttcgttgtgtgagcattgaccctggggaggaagagccttgggggagggcaggctgggaacaaaatccctgaagccagacctggaaggacctggatgggtcaagagcttgaagcaagggccagaatgaggtcatgggtgcatggtaagaatttcatgagcgcccctgtttgtggagctccatgtctgtggcaaacctcagaccctactgcccaggaaaaaagagcctctgttttcgacat

SEQ ID NO: 345 - DNA, 707 bp, Homo sapiens
  misc_feature (495)..(495): S = C/G
gtagatggatgatcggacagcgatgaacaaataaggacaaatagacaactggatggacaagtggatggctggatgggaattacggaagtcaggagaggatatctggagcctactagaacctggacactcatgagtggttttccttcaagggctggcaaatttcttctgtaacacgccacacagtaaatatgtgagcttttggggagcatgttcagtctctatcacatattctttgtgtttaaaaatataatcctttataaatgtaaaactacccttagctcacagaccatacaaaatacgccacaggccaaagtggcctgtgggccacagtttgtcagcccctgttgtactttgatggaacctgtctgtgtgcctctaccgtatcctgtgattacaaaggagccgtgggaaggacaaatcaaggtgggccccactctacgcagagcaggacactcttactattccacagctgaagatgtccactcgctttgtcasctgccccacccggatgaaatcctctggcagatacgcggctgacgtccggagcaggtgagtcttcatcatggtgtattttgaccttttgttgacaggacacagatgagccattgggtgagcaagtttgggggtgagattttggtccagcaagacattagagctgtggaaatgaaaggagagggaaccttctcattttgagctggataacaaca

SEQ ID NO: 346 - DNA, 848 bp, Homo sapiens
  misc_feature (402)..(402): S = C/G
ctgaacacatccacagccatgaagatggtgcttttacaaacgaacagtctcggtgagtcacaccactcttgcccatcctttgacagatcctcgtccctgcctctccttcctctcagtggccattgaaaccctgaactgcactaccattgaccctttaaaagtttatctcactgaagactattacaacaatgagaagcagaaatgaaatctttggaaagataagtagatatggaagcacttgtaagtaaatacattttttaaaaagtgttttgcctggaacattgattggataaaggcaccaatacagacctgagatagtggcttcccgttggcacagttgatgcccccaatgaagaccatgttgggcatgatcggcctggggtagtccatcacaaagtcccstcggaacagccacacagatgcatggctgacaagatccaccactgacacctctctctgaaaaagctcagaggcaaggcttgcataaggagcagaaacagcatggcaaaggtaggacagggccagagggtagagcatgttcttgaccctttgcaggaatgtcatgtggtctgaattggtcgttagtaatctaggaatataggaggaagggtttggacactgtgtgcccttaaagtctaatcacatggaatgttcctcaagaaaacacagcaggaatcgacaggtacttagccagcaccgcgcgcagaggtgaaaggggtctgttagaaccacatcaaaggagtagcatgcaggtgcctgatcagggcctcattttgcagtagcttcacacagacctatgtttgatcaaagacatattgttcataattgccatccttctagaaatttca

SEQ ID NO: 347 - DNA, 511 bp, Homo sapiens
  misc_feature (256)..(256): M = A/C
gtgagcaacagaacaagagactgtctcttaaaattaattaattaaaaacatgggaaactcctttaattttaagtaagacaagaaaaaggcattaggagccatacggttgtgaaaagccttgtgtggctttggttcaggagagaatgatgataaatagaattttacttactatattgtgcttcctgtttttcagacattgttgaggtcattaatgaaaacgtaaagaaaagcagaagactgattatcattttagtcmgagaaacatcaggcttcagctggctgggtggttcatctgaagagcaaatagccatgtataatgctcttgttcaggatggaattaaagttgtcctgcttgagctggagaaaatccaagactatgagaaaatgccagaatcgattaaattcattaagcagaaacatggggctatccgctggtcaggggactttacacagggaccacagtctgcaaagacaaggttctggaagaatgtcaggtaccacatgccagtcc

SEQ ID NO: 348 - DNA, 501 bp, Homo sapiens
  misc_feature (251)..(251): R = A/G
tgggttgaattctttttatcactcccacaaataacaagtaggtgctcaaagtaacatagcccataagtcatatgctattaaaaaaaaaaaaagtcagttacctaaatcacctgtaaccctgtaagatccatttgcaaaaatccagaagaaaattcctctggcacttctaatcaaaataccacctttatttactcttcctgcaatgaacacacctcctgtgtcaggggtctctatgtatacatcacactttrtagtcagattggtcctgcaaaataaaacggttgattagtactctttaaaatatgccctttgtaacatagtacagatatgtcatttcacagcacatgcttccaaacttctaattgaggtgagaatgtgatttgctaagtctaagcctgtagcagagatgggcttcaagaatctttattgacaacagttttaaatgttacatgacttaagtcatttcattgcctctttaaatgattactggacaataatagt

SEQ ID NO: 349 - DNA, 801 bp, Homo sapiens
  misc_feature (401)..(401): R = A/G
gtgggaagttgggaaaaattctcaagaacaaagaatcatactgatcctaatataatattttgtaaatttaaatttaatattaattattcattatttgtgaaaatagctatctaataacaacttctgagagcatggctgccaggaggtattatgtatataatgaaaagcatatgtatatatgtaaaattaaaatatctcaggagaaacttactataactatacctaccttgcagattaagaaatcttttgaaaaaacttaaataatttatgcttcataggtatataattttcaaaaggaaattgcatctttatagttattgtaataaaaatatcatatcattctagctttaaaaaatgtaacccatcatcagatgaaacatgaggacagctactcatctttrggagtcttagagtgtcactattattggccacaagaatcttcaatgaaggatcatccactggtgtatcttcaattttgattgatgataatgattttgagttgataaaaacaactgtaagtgctgacacaaaatgagacttgcatggcaataagaaaaaattatgaaaacattattttaaaatgtacagctttaagtaattcattaaaactatatcaatacatgctaatgataacatagtaagaaccatgaacatacggctgtttccacagaatcattttctagtagaagatatttttataatgaagtatagttttatactttttataattgataaatgaaatagtgagaaaaaaaagcttcaaagatttcataaaacatgtcttccaattacttcaattaa

SEQ ID NO: 350 - DNA, 1202 bp, Homo sapiens
  misc_feature (102)..(102): N = A/C/G/T
cccccccccccccccccccgatttggctccagccttagccctcgtcccctccccaaccccctgcaggctgggactgctccgaagatgtggatgagtgtgagncccagggtccccctcactgcagaaacgggggcacctgccagaactctgctggtagctttcactgcgtgtgtgtgagtggctgggggggcacaagctgtgaggagaacctggatgactgtattgctgccacctgtgccccgggatccacctgcattgaccgggtgggctctttctcctgcctctgcccacctggacgcacaggtatgggggtagagggtatcaggaggtgggaggtagagaaggagggtgagagaagcaccaggaggactgctaggagcttcaagtggcctttgagagcctcaccccctcttacccctccaggactcctgtgccacttggaagacatgtgtctgagccagccgtgccatggggatgcccaatgcagcaccaaccccctcacaggctccacactctgcctgtgtcagcctggctattcggggcccacctgccaccaggacctggacgagtgtctgatgggtgaggccactcccacttcagagcctctctgagcctcagacaggcctctgcactgaagacagaaaagggggcagattgcttttccaattaaaaaaccaaacatctttttccttgaatttgcccagatttggcatctcttgcctacatgaccctctctccaatgttcagcccctcagtccccatgagtttggtcccttatttcctttccatcttaaagacacaagccccttccccaatttggtctcgtctgccacacgcaggcccccacaccttccctgacagtctcacctccttgcccttcctgccctgacccctgtggactcccagctcttctctcctcccagcccagcaaggcccaagtccctgtgaacatggcggttcctgcctcaacactcctggctccttcaactgcctctgtccacctggctacacaggctcccgttgtgaggctgatcacaatgagtgcctctcccagccctgccacccaggaagcacctgtctggacctacttgccaccttccactgcctctgcccgccaggtatcagctggatggggccttgggtggggaaaacagggaactagtcctgaacccactaggaatgccccctccagagtaagaccc

SEQ ID NO: 351 - DNA, 801 bp, Homo sapiens
  misc_feature (401)..(401): R = A/G
ggcgtgatctcggctcagtgcaacctctgcctcctgggttcaaacgattctcctgccagccttccaagtagctaagattacaggcatgcaccaccatgcctggctaattttttgtatttttagtagaaacagggtttcaccatgttgcccaggctgggtcttcaattcttaataaggttttaagataagatagtaaaatgagagcacatgttattacaaagtagattaatttaaataattaaaatatatattctattttctttcactatgatttgaagctcttaaagttttaacactcattttaaagctagatattaaagaagaaattgaagatgaagaaaagacaattgaagattatattgataaaaagatgaatgatgctgattccacttcagttgaarctatgtactctgttgctagtcaatgtctgcatgaaaagaaaaataagagaccagacattaagaaggtatgcattttttatacttatttaaaaagtgaaaggggtggggttcatcatattttccagagtgtatattttaaagcaactgtataatgtggttcttttgtttttttctttctttttaaaaggttcaacagctgctgcaagagatgacagcttcttaaaactttattggaaaagactcttgactttttatatacacctatctcaaccatttttttaactgatttttttcctaaatattcttctttacctttaacaaggcataggctgttgcaggacagtggttattaaagcatgggttgaacttccaaaatataaaaatagagccaccatatcaa

SEQ ID NO: 352 - DNA, 801 bp, Homo sapiens
  misc_feature (401)..(401): R = A/G
ctttcatacgttccttgactctaacattgcttgtgttatatagaagttttaatttttatgtactcaaattatctattctaatggctcttgggttttgtatcttacttataaaattcttttcatttcaaaattaccaagaaattttacatttttctttcttatttatttattcatcaataagctctaaaattgatttatttggagaaaatatttatgctcttctctagatctgaaatatttggtttgctgtcacttttagattgctccttggtagaattagctttcctagcttgtagctgagaggaggttaatctctatttttcttttggtcctagtggaaggaggcatgcatccccagctgataccttcggttattgctgtagttttcatcttacttctcrgtgtctgttttattgcaagttgtttgggtaagttattagccaaagtagaactcttcttgaattattatttccaaacaacttttctgaagttgctctaagccttttggtatcttgatttttcctagcataacctatctataatatcttcagggtcttgcactgaatattcagagctacattcttgaccttctgtctttcaatggtggtaccttgtgatagagattgattgatggaatttagaccattttctgtacatgtaaaagttggttactatagcaaatttccccccattttggactgggatcacaaagggatacatcttatgagaaaagagtaagcagaagaaaaataactttcagatagactggctttgaaaagaacaaggttggaagaattgttc

SEQ ID NO: 353 - DNA, 801 bp, Homo sapiens
  misc_feature (401)..(401): K = G/T
caacaggggaggtggcgtccacagggatggcccactgctcctgagatggaggctctggggcctctggggtggatacagctgtggacgcttcctggaagagtcaggggtagcagtgataaagatacaaccagagggctctcaattagcactcctcccaaaagatgtccctttcttcccctcagacccatcctagccagcccacatcctggtggcaaggctctttcttgcctccactacacagaaccaccaaccttcaacactaggtcttccaagctgcttgctcgggccaggggagcactgcagggagaggctgaaacagtgtcccctctgggacctcctggctgtcccactgcctcattctcatcctcgtcacccccacccaaatccagaggctccaacakacagctaaggcttagtagtccaggagctggagttggacaatctgaggagcaagccaacaaggtcaaccttgtcatgtccatctctgttccttaggagaaggacatgacttctcctacaccccactcaaaaactaaaactaaccttttggtgcaaagtccatgcctttcttgaaaccaggtggaatagtaagaagatctgtaggatagggacatgaaatcaggtcactgcacactggtgaacaaattgtgtacattatataaacctaaaagataccatttacaggacagatgctgtagatagggatgtttgctatgacactttcccaacagatgacagtaaaggttgttgtagaaatttcccagcagatgacagtaaaggttgttatggacagaatatctt

SEQ ID NO: 354 - DNA, 601 bp, Homo sapiens
  misc_feature (301)..(301): Y = C/T
cgggttcgttcaagccgccctgcagctcttcgaagctgtcgatgacgaacaagagtctctccggttgagacacgatctctgttataggagcagcggggtcaggccactctctggaaatcaagtcagccaaactcgttggcggcaactccctcagttctctgcagcagaaatagaacgtgtacaggaacctatcccgaaagatcttgttgtccgaccaggccatcatcagcttcatcaggagtgtcgtttttccaattccttgtggtccttgaatgatcactgtacgtggctgtttcccagyttccttgggagcaaaaaggcggtccaaatggtcacattcttcttgcttgacttcctcctcaaagtataggtgaatctcagtgacagacttgctggaccataagcggctgaatttctgctttgcgtgagcttgataggtctttgtgtatcctgagtcagtgagggcaagaggagagaaaacccacaaagttaagcattcctgcatatattctttttttcttctcaggatgtatctttccagaggtctacacactgtggcccccaggccaaacctggtcagtctcctcttgtaaataaagtt

SEQ ID NO: 355 - DNA, 1001 bp, Homo sapiens
  misc_feature (501)..(501): R = A/G
ttcagaaagctttccaaatcctggtgcctggcgtattccaatagtcttcttcccagtcttcctggttacatttctccctgaacccatcctccccatccctaaaatttcccccaaatgtgaactcagtcataccagtttgctccttatgtttcattggcccttgctgctaagagcatccgcttgcaccttctgctcatccccagacaagctttgtcctgtgaccataatgaactcttcatgccgtttccaactttagcccatgttattcttcttgtctgaatatccacccttttctctgttctcaataataagttcaggcttttcgtcttctgagaagccctttctgacttccacaggctgaaccactggcttctgctcctctacataatacttcaattccagcattgatctcactctatcatgatcatgggtttagctgtctgtccctgccactgctgtgtgttcctcttgagggcaggaacatttgtttttcactttttraaaaacctctgttgcccagtctggcattaggaagtgcccattaggttgttattgcttgttggcgcttgagctggggcttgaaggtttctataatgtgtagcagtgtatagaaaacaggcaggtcagaaaaggcttctgtgcatcacaccaacatggcacatgtatacatatgtaacaaatctgcatgttgtgcacatgtaccctaaaacttaaagtataataataataaaattttaaaaaaaaaaagaagaggcttcctggaggagatgacagctgagctaagtcctggaggatgagaaggagtataaaataagataataggagaaaaaaggcagtaggaacagcatgggtaaaggtgatgaggcctgaaagaggcacgtggaaggaaagacaaatgcaggaagggggaatgggagggaatgctggggtacaggccaaagagggaggcatttggtgagtattctgcagagtctcctctgctgtgctgaggtgtggacaat

SEQ ID NO: 356 - DNA, 864 bp, Homo sapiens
  misc_feature (501)..(501): R = A/G
tggagtgagctgagattgccttattgcactccaccctggccgagaagagtgaaactccatctcaaaaacaaaaacaaacaaaacacactatcaacaagtcacagctgaacctgtctgtgcagcactcagcaatccctgccctccctccctcctccacttacagccagtcacctcaatttgatggctttttattcacattcatgtttgtatacatttaccatttacttattatctataaaaatatatatacttgtttttcatgttttaaaatgttacatgaatggcctctgtcgttaactttctgcatgcaattttttttcactcagccctgatgtgtatgagggaacaaatgcctgaggatctttcccaggtaactgagctgaaaagcaattgggcttgatgagaccctttccagccccttcccatctactcaccctgattcctgtggttacggtcattatcaaaatcattcccctggaggtctgtggcccctgtattacrcatgaaaggtgggagggtagccttgaaacctagaaagaagcaaaatgtttattcctaagagacaagctttgacctgccacggtggttcatatctgtagtaccagcgctttgggaggctgaggctggagtattgcttgaggccaggagttcaaggctgcagtgagctatgattgcactactgcactctagcctaggtgacagactgagactctgactcaaaaaaaaagaaaaaaaaagaaagagagatacaagccgagagaaggaaggtagggacggtgtggaggtgccgggatgccacagagacacttggactcatcagaacagaagcctaagggagagaaacgtgcaggatccaggtatgag

SEQ ID NO: 357 - DNA, 501 bp, Homo sapiens
  misc_feature (251)..(251): M = A/C
acggctagaaggcctggtgtggcagccactgtgcagcctggccaaagccctgcttggccctcagaacctgatcaagaagcgtctggacaagctactggactttgagcgggtggaagagaagctgctggaggtgggcagtgtgacctaccaggaggaggccgcccggcacacataccaggcactcaactcgctgctagtggctgagctcccacagtttaaccagctggtcatgcagtggctgggccagatcmtgtgcacattcgtgaccctccagagggaccttgcaaagcaagtgctgcagagggcagagggaagcatggcccaggtaaggcctctgagacttggacacctgtggggagtagccaggcaaggccctgcagccccatcagccagctgtgtgtaggggctaggatggagggaggatgggcctgaaaacaggtcatcaggcccttaggaagaggcagtgggaaccttccagatctctctcatgcccagtctccc

SEQ ID NO: 358 - DNA, 801 bp, Homo sapiens
  misc_feature (401)..(401): Y = C/T
ggacccctcctcctcttttcccagaccaagctctcaggggacaactcagaagcacaaaagtcaccactgggagcaaaggggaccaaagagccataaacagacatgtttgggatttcaaaagtttatctcaatctcctcattcccagacttccaggtgggaggcaggccgggcagtaatgtgagcatctcaaggacaccacagtcactgcgaccaagccagtctgtgtcctcatttacacaatgaaggcgatggaccacatagtctctgacgtcccactgcaccctgacagctgacaaatctgtttgtcctcaaagacaggtctgagagggaggaaaactgatggggatgatgagttagagctccgggctccctggggctggaggctcatccatcagctgcyggaggtgagaggctgccttgtccagttttgacaattccagctggagggaagaaagctggacgaggagaaaaggaggtgaggatccaggaatgaggcccctcctggcccacattccctcaggggtggagccttctgggggcctccctcagccttaccttttgttgcctctgagtccctgcctccccttctgatggggtcctggctgtgaggctgtcaagctgcttctgcaacttgtaccttcgggcggctaacagaggtagctggatctgcgggtccaccaggccctggggaagaacagggagaaaaggctcagacatccgcctgctgccaggcctccatcctccattagaaggtcccttcccctactttatagagcccagcccctcccttcctcccagca

SEQ ID NO: 359 - DNA, 1200 bp, Homo sapiens
  misc_feature (1000)..(1000): W = A/T
tcatctctccaacattcatgaaagtccccttaaacctaaaaatgtatagggctgtgctcgctttggcagcacatatactaaaattggaatgatacagagaagattagcatggcccctgcgcaaggaggacatgcaaattcgtgaagcgttccatatttttaaagtcaggaaacaacaggtgctggagaggatatggacaaataggaacacttttacactgttggtgggactgtaaactagttcaacccctgtggaagatagtgtggtgattccttcagggatctagaactagaaataccatttgacccagccatcccattactgggtatatacccaaaggaatataaatcatgcttctataaagacacatgcacacgtatgtttattgcagcactattcacaatagcaaagacttggaaccaacccaaatgtccaacaatgatagactggattaagaaaatgtggcacatatacaccatggaatactatgcaaccataaaaaatgatgagttcatgtcctttgtagggacatggatgaagctggaagccatcattctcagcaaactatcacaaggacaaaaaaccaaacactgcatgttcttactcataggtgggaattgaacaatgagaacacttggacacagggtggggaacatcacacacaggggcctgttgtggggtggggggaggggggagggatagcattaggagatacacctaaaataaatgacgagttaatgggtgcagcacaccaacatggcacatgtatacatatgtaacaaacctgcaccttgtgcatgtgaaccctagaactttaagtataataaaaaatatatattaaaaaaatatataggtctctgagaacatatagcatgacagaagctgatgaagctcctcttccaaaggctgtccaactataaaaccctctttttctgtaccccacttttctctcccgtactctgtcttttctgacagatattgatgagtgccaactgggggwgcacagctgtggagagaatgccagctgcacaaatacagagggaggctatacctgcatgtgtgctggacgcctgtctgaaccaggactgatttgccctggtaggttggtgggtggtctacagtgaaggggagggacttggctcggggatattctataccctaatctctatttgcattagagattctaaaaatcattcagtt

SEQ ID NO: 360 - DNA, 601 bp, Homo sapiens
  misc_feature (301)..(301): S = C/G
cagctctgacttctatgacatcgtggtcatcgccacccccctgcacctggacaacagcagcagcaacttaacctttgcaggcttccacccgcccattgatgacgtgcagggctctttccagcccaccgtcgtctccttggtccacggctacctcaactcgtcctacttcggtttcccagaccctaagcttttcccctttgccaacatccttaccacagatttccccagcttcttctgcactctggacaacatctgccctgtcaacatctctgccagcttccggcgaaagcagccccaggasgcagctgtttggcgagtccagtcccccaagcccctctttcggacccagctaaagaccctgttccgttcctattactcagtgcagacagctgagtggcaggcccatcccctctatggctcccgccccacgctcccgaggtttgcactccatgaccagctcttctacctcaatgccctggagtgggcggccagctccgtggaggtgatggccgtggctgccaagaatgtggccttgctggcttacaaccgctggtaccaggacctagacaagattgatcaaaaagatttgatgcacaaggtc

SEQ ID NO: 361 - DNA, 501 bp, Homo sapiens
  misc_feature (251)..(251): Y = C/T
tgtccactcacaaggcctgcttccctcatgacatctggccagtgacacccacaggggaggttgggggcagacacccttctcttccggtacccttgaacatggtgtcagggtgtggctagctcgacggacaccgaacagctccacagggagggtagtgcccaaggctttttgcctcccctaccatgtcccgcacttcctgaatgcagctcaaaccaggagcagctcccccaggattctggcctgcttcaccyctggagcaccaggccaggcggtgtctgtccttgagagccaggcccaggtctcacggtggcgtatggacagctcctccccataggcctggtcacaatagggaagcgggggtggctcctcccctagcctgcaggaagcccttggtagcccacttatccaccttctcctgggtgtgtggctcagcagccaagtccttgtgcactgggttgggtcccagcatgagcctggtggcctggcgggccctggcaccat

SEQ ID NO: 362 - DNA, 601 bp, Homo sapiens
  misc_feature (301)..(301): R = A/G
aagtgtaatgagtgtcacaagaccttcagtcacaggtcatctcttccatgccatcgtagacttcatagtggtgagaaaccttacaagtgtaatgaatgtgggaagacttttaatgtacagtcacacctttcacgtcatcatagacttcatactggagagaaaccttacaaatgtaaggtttgtgacaaggctttcatgtgccattcttatctggcaaaccatactagaattcatagcggagagaaaccttacaagtgtaatgagtgtggtaaggctcacaatcacttgattgattcatcartcaagccttgcatgtcatcatagacttcatactggagagaaaccttacaaatgtgaagcatgtgacaaagttttcagtcacagatcacgccttaaaagacataggagaattcatactggagagaaaccttacaagtgtaatgagtgtggcaaagcctttagtgaccagtcaacacttaccatcaggccattcatggtgtagggaaacttgactaatgtaatgattgtcacaaagtcttcagtaacgctacaacgattgcaaatcattggagaatccataatgaagagagatcttccgagt

SEQ ID NO: 363 - DNA, 801 bp, Homo sapiens
  misc_feature (401)..(401): Y = C/T
gtcttggatcaccacctggtgtatcctcttgcttcatgagataactccctagaaactgggcatcggagggatatactgtgggggtgacataatgcacttatctcacagctcaattttttcatttggattccagatgctactgtcattcacgatatccaggaggaggagatggaaaatgatcaaacccctcctgatggcttcctgtcaaattctgattcaccagagctgataaatatgacaggacattgtatgccacccaatgcattggattctttctctcacgacttcacaagtctcagcaaagatgagctgctttacaaacctgatagtaatgaatttgcggtaggcaccaaaaactacagtgtctctgcaggtgacccaccagttacagtaatgtcttyggtggaaactgtgccaaatacaccacaaatatctcctgccatggcaaagaaaattaatgatgatataaaatatcaattaatgaaagaagttcgaaggtttgggcaaagtaagtactgcaagaatgtctatcaatgaaagcatgagaagtgtctcattctatgatttagaacagaattgagctgcctcttgagctcattgtttggctgaattggatctatatataatttagcatggctttactttaatttcactgaaaattgctaatatgtctgcttaagtgttttgttttcctttgttagtgttcacaatagtttccttagtaatatacagatgtcgtgatttaagcattcaaaacaagcactatgtaacattgtagcccatgaaaaatgtatactgtgg

SEQ ID NO: 364 - DNA, 601 bp, Homo sapiens; identical to SEQ ID NO: 32
  misc_feature (301)..(301): S = C/G

SEQ ID NO: 365 - DNA, 601 bp, Homo sapiens
  misc_feature (301)..(301): S = C/G
ccccgcagttcttttcttgaggaggacagatagggtttcttagggagttaggatgaagaaagcctaagtatgatgaattccccatccagcactgtgcccagcacatagcagacatccaataaaggtctgttaaatgaatgacacggamccgttstttaagattttaataaaggtggggcaawgggttgaattggtcgaaaagtcctcaacgtcctgacgggactcccctgaagccaaggcagtttgagtccattcattattctgtcttggatcttaggcaaagccccgggccccttggagsagcaccagggttcccgacacccccaccgacagggtcgaacgtgcacaggctgggaccacgccggagttcattgagccctygtgggggagggcagttccagggaccaggaagggattcccgtccagtgtcaggttatccacctcgggcagctcgtcaggctgcggcgccctgttcagtctgttgcagctgagatcgagcactctgagcttggctggcagtcctttaggcacctgttccagmccagcgaacgacagattgagggagttcagggcgctggaccacatgcatctcggagcgcta

SEQ ID NO: 366 - DNA, 1374 bp, Homo sapiens
  misc_feature (1189)..(1189): S = C/G
tccaacaggaaggtgtcattgaataatccatgcacatcagtaaatagaaaattgtgcagacactaaaaattgtgttttcaaggaataatgaatgatatgagaaaatgctattatggcaagtgaaaacacacaggatacaacatcgtatagtcacaatgatctcaatttttaaatcatatttaatagtattttaaaataagaaagaaatgcatcaatgttaacagtccttctttctaggccaccaccagaaagggattatgggtaatctctctcactctcaaagtatttctgtatttccatgttatatatagaatcatatacctcccacaagcagaaactataactttaagaaaaatggtttttcaaactaatttaaggttggcgcgtcaatgaaattgggggggatccatttttgaaattagttaaaataaatcctctttctctgtgggcagcaatatggcttttgtaaggcaacactcagtgagaagcttggtggggcagaggttgcagtgacctgcacggtgttccaaacacaggtaacagctccgtgaatattcttgcctacaccttcagaatacaatgaccccttcacatttatgcagtgcagtagtgatgacaggacatttgctctcccgtgcttctgaatctcacagtatgaaataacactggggtatgcggaatcatcaacaaatggaaggatattttagctatgcctttccctcccacgaactagtgactacagggaagaaccatcttactgtgtagttgacaaagccacctttttatttgtgggaggtgggagtggttttctgagttgcagagaccaggtggccagatctacctgttagctcccagtggctgcagcttcagatgacaaagagggtggcactgctgggcaagggtgagccataggtggggtgcttttactcattggacatatgtgtgtaagtccaccatcacaaagacaatcctagtgaggccggggccaacataggccagtcacccctccttgtaaccttgatgacaatcccttgtacttaggtaggtcctttcttgctagactctttgcaaataaaaatgtataatgtgaggaaattgggtgccagtgccacctgggcctgtgggttgtcttgcctgggaggaggaagcaaactaactgaaggaaatggtcctttttccagcccgtgasctcacagccccaaccagaaggtgccaatgaagcagtccccacccccgtggtggacccagatgcacctccgtcccctccacttggcgcacctggactccctccagctggctcacccccagactcccatgtgttactggcagctcctccaggacaccagttgcaccgggcgcactacgacctgcgcc

SEQ ID NO: 367 - DNA, 1567 bp, Homo sapiens
  misc_feature (201)..(201): M = A/C
aaacctgagcaacagctcaagctttgagagtttgctcacccgtggaaagcggttgcagaagcccagtaggcatccactgctaatttgaggctgttgcatttgtattctccttctcacacactgagttcattcttcttataaataagagtatttgctctaactttgtagttcttcttctccaaaaacaacatctggacattmtttcctgaaaaatacacagcatacctctcctgagaatatttttcatctaaaaatgtaatgttttaaatcaggtaaaattaaagagtaggattgaatattaattcaagatggattaaagacttaaacgttagacataaaaccacaaaaaccatagaagaaaacctaggcattaccagtcaggacataggcatgggcaaggacttcatgtctaaaacaccaaaagcaatggcaacaaaagccaaaattgacaaatgggatctaattaaactaaagagcttctgcacagcaaaagaaactaccatcagagtgaacaggcaacctacaaaatgggagaaaattttcgcaacctactcatctgacaaatggctaatatccagaatctacaatgaactcaaacaaatttacaagaaaaaaacaaacaatcccatcaaaaagtgggcaaaggatatgaacagacacttctcaaaagaagacatttatgcagccaacagacatgaaaaaatgctcatcatcactggccatcagataaatgcaaatgaaaaccacaatgagataccatctcacaccagttagaatggcgatcattaaaaagtcaggtaacaacaggtactggagaggatgtggagaaataggaatgcttttacactgttggtgggagtgtaaattagttcaaccattgtggaagacagtgtggcaattcctcaaggatctagaactagaaataccatttgacccagccatcccattactgggtatatatccaaaggactataaatcatgctgctataaagacacatgcacacgtatgtttattgcggcactattcacaatagcaaagacttggaaccaacccaaatgtccaacaatgatagactggattaagaaaatgtggtacatatacaccatggaatactatgcagccataagaaaggatgagttcatgtcctttgtagggacatggatgaaatcggaaatcaccattctcagtaaactatcgcaaggacaaaaaaccaaacaccgcatgttctcactcatagatgggaattgaacaatgagaacacatggacacaggaaggggaacatcacactctgggtactgttgtggggtgcggggagggaggagggatagcactaggagatacacctaatgctaaatgacgagttaatgggtgcagcacaccagcatggcacatgtatacatatgtaactaacctgcacattgcgcacatgtaacctaaaagttaaagtgtaataaaaaaaaagagtaggattgaatatcatagtttgatctcccagactgggaagcacatggtgttgctttaaactcggacgccagagctgaatttttccaacaaataacaaatag

SEQ ID NO: 368 - DNA, 801 bp, Homo sapiens
  misc_feature (401)..(401): R = A/G
gcaggcattctgattggactgaacctcggaccccccatcagcttacagaccgaggagccaggcaaacctggctgcccactgggctcctttacctgtttgctgtatgatcttgggcaagccccctcaccgctctgtgcccggcttttccactgcaagaaaatggcaacaattatggtacctacctcaaagggtgaaatgaagcagagtgatgtgtgtcgggtgccccagagagcacctacctgagggaggctccaaagctagcaagaggcagcaggacagggaccaggacgcaggctgggtggagggcagtgggaggtggtcggggctccatctggccctctgagacttaaaggagctttgcttttcagagttgagaatggagagaatgttacctctcctgrctctggggctcttggcggctgggttctgccctgctgtcctctgccaccctaacagcccacttgacgaggagaatctgacccaggagaaccaagaccgagggacacacgtggacctcggattagcctccgccaacgtggacttcgctttcagcctgtacaagcagttagtcctgaaggcccctgataagaatgtcatcttctccccactgagcatctccaccgccttggccttcctgtctctgggggcccataataccaccctgacagagattctcaaaggcctcaagttcaacctcacggagacttctgaggcagaaattcaccagagcttccagcacctcctgcgcaccctcaatcagtccagcgatgagctgcagctgagtatgggaaatgccatgtt

SEQ ID NO: 369 - DNA, 601 bp, Homo sapiens
  misc_feature (301)..(301): R = A/G
catcatccgaggaccgcctatctacctttatggcacggaacttcagcagctttgctgttccaggccctagccatgccttaggagatcggggcccaagccgtgttctcttcttgggaggaagatcttttgcctcctcagcccttttcctcttctgcccaacagtctcagggcggtttttctggcccttccttgtagttctggccttagcagatccctttggcctgcctctgcccctgggctgggtccgagccaccttggccttggcccgtactgccttggctttagccttggccttggcccrtgctgccatgactttggccttggccttgacctgtgctgccttagctttggccttagccttgacctgtgctgccttggccttggcccgggccttagcagccttggcctgtgttcgagccaccttggcttgggcacgagcagctttggccagtgttcgagctaccttggcctgggctgttttggtgcccagggcagagccccctttcattcgccggacactgggggacccagtggctctgttggttttgctctggtgcccagagcctcgtcggggtccagccccagggcctttgcgagtcag

SEQ ID NO: 370 - DNA, 601 bp, Homo sapiens
  misc_feature (301)..(301): W = A/T
cctagccatgccttaggagatcggggcccaagccgtgttctcttcttgggaggaagatcttttgcctcctcagcccttttcctcttctgcccaacagtctcagggcggtttttctggcccttccttgtagttctggccttagcagatccctttggcctgcctctgcccctgggctgggtccgagccaccttggccttggcccgtactgccttggctttagccttggccttggcccatgctgccatgactttggccttggccttgacctgtgctgccttagctttggccttagccttgaccwgtgctgccttggccttggcccgggccttagcagccttggcctgtgttcgagccaccttggcttgggcacgagcagctttggccagtgttcgagctaccttggcctgggctgttttggtgcccagggcagagccccctttcattcgccggacactgggggacccagtggctctgttggttttgctctggtgcccagagcctcgtcggggtccagccccagggcctttgcgagtcagacacttggggcccttgcttgtggtttttctgggagctttgggccgagggttccccggacccttcc

SEQ ID NO: 371 - DNA, 801 bp, Homo sapiens
  misc_feature (401)..(401): R = A/G
aaattacctgagtatttttctaatctgaccaatctagagcacttggacctttccagcaacaagattcaaagtatttattgcacagacttgcgggttctacatcaaatgcccctactcaatctctctttagacctgtccctgaaccctatgaactttatccaaccaggtgcatttaaagaaattaggcttcataagctgactttaagaaataattttgatagtttaaatgtaatgaaaacttgtattcaaggtctggctggtttagaagtccatcgtttggttctgggagaatttagaaatgaaggaaacttggaaaagtttgacaaatctgctctagagggcctgtgcaatttgaccattgaagaattccgattagcatacttagactactacctcgatgrtattattgacttatttaattgtttgacaaatgtttcttcattttccctggtgagtgtgactattgaaagggtaaaagacttttcttataatttcggatggcaacatttagaattagttaactgtaaatttggacagtttcccacattgaaactcaaatctctcaaaaggcttactttcacttccaacaaaggtgggaatgctttttcagaagttgatctaccaagccttgagtttctagatctcagtagaaatggcttgagtttcaaaggttgctgttctcaaagtgattttgggacaaccagcctaaagtatttagatctgagcttcaatggtgttattaccatgagttcaaacttcttgggcttagaacaactagaacatctggatttccagcattcc

SEQ ID NO: 372 - DNA, 801 bp, Homo sapiens
  misc_feature (401)..(401): Y = C/T
gaaggaaacttggaaaagtttgacaaatctgctctagagggcctgtgcaatttgaccattgaagaattccgattagcatacttagactactacctcgatgatattattgacttatttaattgtttgacaaatgtttcttcattttccctggtgagtgtgactattgaaagggtaaaagacttttcttataatttcggatggcaacatttagaattagttaactgtaaatttggacagtttcccacattgaaactcaaatctctcaaaaggcttactttcacttccaacaaaggtgggaatgctttttcagaagttgatctaccaagccttgagtttctagatctcagtagaaatggcttgagtttcaaaggttgctgttctcaaagtgattttgggacaaycagcctaaagtatttagatctgagcttcaatggtgttattaccatgagttcaaacttcttgggcttagaacaactagaacatctggatttccagcattccaatttgaaacaaatgagtgagttttcagtattcctatcactcagaaacctcatttaccttgacatttctcatactcacaccagagttgctttcaatggcatcttcaatggcttgtccagtctcgaagtcttgaaaatggctggcaattctttccaggaaaacttccttccagatatcttcacagagctgagaaacttgaccttcctggacctctctcagtgtcaactggagcagttgtctccaacagcatttaactcactctccagtcttcaggtactaaatatgagccacaacaacttc

SEQ ID NO: 373 - DNA, 791 bp, Homo sapiens
  misc_feature (398)..(398): n is a, c, g, or t
  misc_feature (703)..(703): Y = C/T
ccctaactgatatgtcctttgtctagcaattctacttctggaaattttcccacacttaaactggcacatgtgcaaaatgaaagagatttccttgcagaagagactggaaataattcaaatgtctatagtaggggtactaattatataaataatggtgtgtctatagagtagaactgtatccagctatttaaaaaacaaggatagaaagatcttccaaacatatttttaagtggaaaaagcagggtggaacagggactatacatgctatctcttgtctaaaagatggggaaattaggaatatgtatttgtttttgcttatgcatgaagatactctgaaggattcacaaaagaaaaaaaagttttctaaagggagcaagacttttcacaatttttttttngaatgcttaaaattgttgaacccaacgactgttgcctgttcaaaagttaaatttaaaattcctcccagactaggtaggggattgggcccagaagctgagaccaggctcacttgaataaatggggtaaatgactaggaattttactattccttacaggtctctcattatcttgtctttgctcccatttttatatttgcagtttaattagacacttcagaattttgatcacctaatgttgatttcagatgtaaaagtcaagagaagactctaaaaatagcaaagatgcttttgagccagaatgcctycatcktcagatcacttaatttggttctcatgggtaagtgctgctttttatcttagctcttatagaagcaagctgtgatgccatcctca

SEQ ID NO: 374 - DNA, 601 bp, Homo sapiens
  misc_feature (301)..(301): Y = C/T
gatgagtcaggctttgttctaaggtccttgacttatgctaattgaattacatttagtttccatatcaatttgataaagataacacaatttcattattcctcttatatagatgaagaaactgaagttggagggttcaagtaaccttgtttaaaggcacatggttatcaagtggcagggctaggattcaaatccaggcgtcagttcctcttaactcttccccatactgtttctttccctattgaagtgattcagtgtgagcctttggaggccccagagctgggtaccatggactgtactcacyctttgggaaacttcagcttcagctcacagtgtgccttcagctgctctgaaggaacaaacttaactgggattgaagaaaccacctgtggaccatttggaaactggtcatctccagaaccaacctgtcaaggtgagtaacttcagactagaggttttgtcatgcaatcctgggcttacagtcagaacattcagtagaagtttgctgagaagtcaaacttaggagcctaatttaacctaactttgtttaacctactgtgatgtttctcaaaggacttattctaactaaatttttttgaaaaac

SEQ ID NO: 375 - DNA, 801 bp, Homo sapiens
  misc_feature (401)..(401): R = A/G
aattttaagccattgaaaaacatataagcaaatattctaagaagataatatgtattctaagaagaatgaaccagaattctaagtctctaatgcaacaatagactaaatatctttacattcccatttacttggaaggactctgttttagttaagactaagctacctgggaaataaaaagaggacattggggctgatattctcacaaatgaaaggaacacaaagaacaaaacgggttctctatccacacatacttccacttctctgagtaagtgacttgatgtcagagaatctcacaccagattataacaataagacttttaaatgttcaggatgtttatgtttaaagcattagactgataagaaatctgatctatttcttgtatgactagatgtagtcactrcagtggaaaccaacatacgaaagagcaggcggcacattttcatcctgacccctcagatcactcacaataaggagtttgcctacgagcaggaggttgccctgcactgtgccctcatccagaacgacgccaaggtgatacttattgagatggaggctctgagcgagctggacatgctgcaggctgaggcgcttcaggactccctccagcatcttatgaaagtacaggggaccatcaagtggagggaggaccacattgccaataaaaggtccctgaattctaaattctggaagcacgtgaggtaccaaatgcctgtgccaagcaaaattcccagaaaggcctctagtttgactcccttggctgcccagaagcaatagtgcctgctgtgatgtgcaaaggcatc

SEQ ID NO: 376 - DNA, 801 bp, Homo sapiens
  misc_feature (401)..(401): Y = C/T
aaccagaattctaagtctctaatgcaacaatagactaaatatctttacattcccatttacttggaaggactctgttttagttaagactaagctacctgggaaataaaaagaggacattggggctgatattctcacaaatgaaaggaacacaaagaacaaaacgggttctctatccacacatacttccacttctctgagtaagtgacttgatgtcagagaatctcacaccagattataacaataagacttttaaatgttcaggatgtttatgtttaaagcattagactgataagaaatctgatctatttcttgtatgactagatgtagtcactgcagtggaaaccaacatacgaaagagcaggcggcacattttcatcctgacccctcagatcactcacaayaaggagtttgcctacgagcaggaggttgccctgcactgtgccctcatccagaacgacgccaaggtgatacttattgagatggaggctctgagcgagctggacatgctgcaggctgaggcgcttcaggactccctccagcatcttatgaaagtacaggggaccatcaagtggagggaggaccacattgccaataaaaggtccctgaattctaaattctggaagcacgtgaggtaccaaatgcctgtgccaagcaaaattcccagaaaggcctctagtttgactcccttggctgcccagaagcaatagtgcctgctgtgatgtgcaaaggcatctgagtttgaagctttcctgacttctcctagctggcttatgcccctgcactgaagtgtgaggagcagga

SEQ ID NO: 377 - DNA, 801 bp, Homo sapiens
  misc_feature (401)..(401): Y = C/T
tgtcagagaatctcacaccagattataacaataagacttttaaatgttcaggatgtttatgtttaaagcattagactgataagaaatctgatctatttcttgtatgactagatgtagtcactgcagtggaaaccaacatacgaaagagcaggcggcacattttcatcctgacccctcagatcactcacaataaggagtttgcctacgagcaggaggttgccctgcactgtgccctcatccagaacgacgccaaggtgatacttattgagatggaggctctgagcgagctggacatgctgcaggctgaggcgcttcaggactccctccagcatcttatgaaagtacaggggaccatcaagtggagggaggaccacattgccaataaaaggtccctgaattcyaaattctggaagcacgtgaggtaccaaatgcctgtgccaagcaaaattcccagaaaggcctctagtttgactcccttggctgcccagaagcaatagtgcctgctgtgatgtgcaaaggcatctgagtttgaagctttcctgacttctcctagctggcttatgcccctgcactgaagtgtgaggagcaggaatattaaagggattcaggcctcaggtttcatctggtaactttccttccatttccctgcttctgggtggatgcaaaatggccagaaatttttctcctcaatcctccaccatcctccagccaccattttcttcccttttcccttttgcttgcctgtcttcactgtggtgtgggatgttttcactactcttttttcctctctctctgtcttgc

SEQ ID NO: 378 - DNA, 601 bp, Homo sapiens
  misc_feature (301)..(301): Y = C/T
gcttatcatgtatgcctaacatgacaaaaaagagcctatcattgcagccagtatgataatactcagtctgtggggcttcttatttgcttattccatcatcatctgtcctgcttgatgtctttgcctatgcacaatcatatgacccatcacatctgtatgaagagctggatgactaggattaatattctattttaggttcttattcagcagaaatattagataatcaatgtctttttattcctgtaggtgtgaaatccagacaattgaagatggggcatatcagagcctaagccacctctcyaccttaatattgacaggaaaccccatccagagtttagccctgggagccttttctggactatcaagtttacagaagctggtggctgtggagacaaatctagcatctctagagaacttccccattggacatctcaaaactttgaaagaacttaatgtggctcacaatcttatccaatctttcaaattacctgagtatttttctaatctgaccaatctagagcacttggacctttccagcaacaagattcaaagtatttattgcacagacttgcgggttctacatcaaatgcccctactcaat

SEQ ID NO: 379 - DNA, 201 bp, Homo sapiens
  misc_feature (101)..(101): K = G/T
aaatggctggcaattctttccaggaaaacttccttccagatatcttcacagagctgagaaacttgaccttcctggacctctctcagtgtcaactggagcakttgtctccaacagcatttaactcactctccagtcttcaggtactaaatatgagccacaacaacttcttttcattggatacgtttccttataagtgtctga

SEQ ID NO: 380 - DNA, 601 bp, Homo sapiens
  misc_feature (301)..(301): Y = C/T
ctgggtgacagagcaatattccatctcaaaaaaaaaaaaaaagatgtaatcttgcccaacaggtacaataaaagattgccaatgtatagatgtgggcatgtgtaagggacagtggtgaggatgttccggctgttgtgggagctctaggggaaggtgagaaagctaggagtgggaaaactggcaggggcagaaatgagggggtggggaaatggtacggaggttcataactgaggaatgaccacgactgcactatttcaggagcagacaagatggagacaaattcctctctccccacgaacayctctggagggacacctgctgtatctgctggctatctcttcctggatatcatcacttatctggtatttgcagtcacctttgtcctcggggtcctgggcaacgggcttgtgatctgggtggctggattccggatgacacacacagtcaccaccatcagttacctgaacctggccgtggctgacttctgtttcacctccactttgccattcttcatggtcaggaaggccatgggaggacattggcctttcggctggttcctgtgcaaattcgtctttaccatagtggacatcaacttgttcgg

SEQ ID NO: 381 - DNA, 370 bp, Homo sapiens
  misc_feature (171)..(171): W = A/T
tgaagaattccgattagcatacttagactactacctcgatgrtattattgacttatttaattgkttgacaaatgkttcttcattttccctggtgagtgtgactattgaaagggtaaaagacttttcttataatttcggatggcaacatttagaattagttaactgtaaatwtggacagtttcccacattgaaactcaaatctctcaaaaggcttactttcacttccaacaaaggtgggaatgctttttcagaagttgatctaccaagccttgagtttctagatctcagtagaaatggcttgagtttcaaaggttgctgttctcaaagtgattttgggacaaycarcctaaagtatttagatctgagcttc

SEQ ID NO: 382 - DNA, 601 bp, Homo sapiens
  misc_feature (301)..(301): W = A/T
acaacaggtaaaaaactgactccaattcttggtaaacacaagttggagaattgggtgagaagcaagagtccacttcaatacttgctcaatgggatgtgcttttttccaactgggcactacactggaaaatctgggttatacaagcagacaaaatggcttgtttgtgtcagtgggaaataaattctaagagacagactgggtgaagactatgataatttatgagttccagtttgcaactctttacctaaacctgggattctaggatatagagatcctttatgcaaggggagcagaagtatgwtcctccagaaccgctcaataaaattggttctaagaaaaagccactgcatttcaaaactgcctgaagtatatctttcactccactttattattgtattctgaacatggcacctctgcaacttttgtttccatatcctttgagcgtcttctagaaagcaaagcttgattctgccttctgggcttgagcatgtgggcatagctgggttgtcctgcactgcctgaagagctgcaagagacaaggaatatcatgaacagtggtatccctctttgttcttatagcctcacctatggaggaagctac

SEQ ID NO: 383 - DNA, 601 bp, Homo sapiens
  misc_feature (301)..(301): R = A/G
cctgaaggtcccataaggtcttgcctccaagtcctgcccccacccacctccatgtcatctcatcgtgtttttccagatggcccccgactggacgagagggattgtccgggaaactggacgtggccagaaaattcccagcagactccaatgtgccaggcttgggggaacccattgcccgagctcaagtgtctaaaggatggcactttcccactgcccatcggggaatcagtgactgtcactcgagatcttgagggcacctacctctgtcgggccaggagcactcaaggggaggtcacccgcraggtgaccgtgaatgtgctctgtgagtgagccggcgggcagagctgggtgggggcaggggccatggacctaatgcaatcctcaccgcctgttgtatcctccccacagccccccggtatgagattgtcatcatcactgtggtagcagccgcagtcataatgggcactgcaggcctcagcacgtacctctataaccgccagcggaagatcaagaaatacagactacaacaggcccaaaaagggacccccatgaaaccgaacacacaagccacgcctccctgaacctatcccgggacagggcc

SEQ ID NO: 384 - DNA, 601 bp, Homo sapiens
  misc_feature (301)..(301): S = C/G
tcccccatgctcccctgccccatccccttttccccttcccgtcttctcatccctccattcccatctttccccagcaattaccagctctggctgggtcgccacaacttgtttgacgacgaaaacacagcccagtttgttcatgtcagtgagagcttcccacaccctggcttcaacatgagcctcctggagaaccacacccgccaagcagacgaggactacagccacgacctcatgctgctccgcctgacagagcctgctgataccatcacagacgctgtgaaggtcgtggagttgcccaccsaggaacccgaagtggggagcacctgtttggcttccggctggggcagcatcgaaccagagaattgtatgtgggggcagactgtgtagcccaaggcggggatggggactcctgcgtccaagggagaaagggccagggaagcaggtgaggtcgggctgcagccctttttctcccgggttcgtagtctcatttccagatgatctccagtgtgtggacctcaaaatcctgcctaatgatgagtgcaaaaaagcccacgtccagaaggtgacagacttcatgctgtgtgtcggacacctggaaggt

SEQ ID NO: 385 - DNA, 601 bp, Homo sapiens
  misc_feature (301)..(301): N = A/C/G/T
gcctgacagagcctgctgataccatcacagacgctgtgaaggtcgtggagttgcccaccgaggaacccgaagtggggagcacctgtttggcttccggctggggcagcatcgaaccagagaattgtatgtgggggcagactgtgtagcccaaggcggggatggggactcctgcgtccaagggagaaagggccagggaagcaggtgaggtcgggctgcagccctttttctcccgggttcgtagtctcatttccagatgatctccagtgtgtggacctcaaaatcctgcctaatgatgagtgcnaaaaagcccacgtccagaaggtgacagacttcatgctgtgtgtcggacacctggaaggtggcaaagacacctgtgtggtgaggcagccctgcccccagggtctggaagggctgagggaggggactcagcctctgaactggcttctgagagctaaccaggcatctgcttcactgcttcccagctagctgtagccactcgccccatcagtgccccagctccccctccttcccccgcccatccagggacaactgcatctcaccccccacaccagagttcaccgttcctcgtggtaatgtgttg

SEQ ID NO: 386 - DNA, 801 bp, Homo sapiens
  misc_feature (401)..(401): Y = C/T
tattgcttcctcccacaatttttccttaaaacaaattctatttcttttcagaatacatcctctgttagccactaagcattattcattagccataatccactgaacaaatgtcagttcatttacagtacattttaccttttctctcattaatcttccaaattattgaaaatagtccagaattttatcgatacttttataattttatgtacagagaaccatcattttagataacttgagattcagaaaaattttagtttgtcagttttaagacaaaaaaggaaccagtatcaaggggaaaaaaatagaaataaagagaaaatacttgatatctaaatcacgcccttttgttgtatgctcagttatattaacaggttacatggatgaagaacttgcaaaaaaaycttgttccaaaatccagattctaaaatgtggaggcactgcaaggtctcagaatagccgagaagaaaacaaggaagcactaaagaatgacatcatatttacgaattctgtagaatccttgaaatcagcacacataaaggagccagaaagagaaggaaaaggcactgatttagagaaagacaaaataggaatggaggtcaaggtagacagtgacgctggaataccaaaaagacaggaaacccaactaaaaatcagtgagatgagtataccacaaggacagggagcccaaataaagaaaagtgtgtcagatgtaccaagaggacaggagtcccaagtaaagaagagtgagtcaggtgtcccaaaaggacaagaagcccaagtaacgaagagtgggttggttgt

SEQ ID NO: 387 - DNA, 801 bp, Homo sapiens
  misc_feature (401)..(401): R = A/G
tgtatgacactaaagacccagctgtgaccgagtgggttttggctgagctggtggccaaactggaagacccaagagagaaacattttaatttatgtctcgaggaaagggactggttaccagggcagccagttctggaaaacctttcccagagcatacagcttagcaaaaagacagtgtttgtgatgacagacaagtatgcaaagactgaaaattttaagatagcattttacttgtcccatcagaggctcatggatgaaaaagttgatgtgattatcttgatatttcttgagaagccctttcagaagtccaagttcctccagctccggaaaaggctctgtgggagttctgtccttgagtggccaacaaacccgcaagctcacccatacttctggcagtgtctraagaacgccctggccacagacaatcatgtggcctatagtcaggtgttcaaggaaacggtctagcccttctttgcaaaacacaactgcctagtttaccaaggagaggcctggctgtttaaattgttttcatatatatcacaccaaaagcgtgttttgaaattcttcaagaaatgagattgcccatatttcaggggagccaccaacgtctgtcacaggagttggaaagatggggtttatataatgcatcaagtcttctttcttatctctctgtgtctctatttgcacttgagtctctcacctcagctcctgtaaaagagtggcaagtaaaaaacatggggctctgattctcctgtaattgtgataattaaatatacacacaatcatgacattgagaagaact

SEQ ID NO: 388 - DNA, 801 bp, Homo sapiens
  misc_feature (401)..(401): Y = C/T
ttaaggcttttaagaacacctgaattctttccttctgcaaaaccagaggcagcttcttttccgcctattttcagtttatttcttgtgattttagtttttttctcttaaccaaatgctaaatggatttaggagaaataaacttatttgtaaagctgtcaagggaccattagaaggatggtgcttcacagatagaatacagtttttattaatgatgcctagacaaatcctgccattagcccaagggctcagaaagttagcagcctagtagttttggagttgtcaatgaaatgaattggactggatggttaaggatgcccagaagattgaataaaattgggatttaggaggacccttgtactccaggaaattctccaagtctccacttagttatccagatcctyaaagtgaacatgaagcttcagtttcaaattgaatacattttccatccatggattggcttgttttgttcagttgagtgcttgaggttgtcttttcgacgtaacagctaaacccacggcttcctttctcgtaaaaccaaaacaaaaaggctttctattcaagtgccttctgtgtgtgcacatgtgtaatacatatctgggatcaaagctatctatataaagtccttgattctgtgtgggttcaaacacatttcaaagcttcaggatcctgaaaggttttgctctacttcctgaagacctgaacaccgctcccataaagccatggcttgccttggatttcagcggcacaaggctcagctgaacctggctaccaggacctggccctgcactctcctgttttttc

SEQ ID NO: 389 - DNA, 602 bp, Homo sapiens
  misc_feature (27)..(27): n is a, c, g, or t
  misc_feature (37)..(37): n is a, c, g, or t
  misc_feature (76)..(76): n is a, c, g, or t
  misc_feature (302)..(302): R = A/G
ttagtgatgtctaaaaaagctaaaaanaaaaaaaaangagcactgcattcaattagtgatgtctaaaaagggtagnaaaaaaaaaaaaaaarrawaaagaaagagcaccgcaatcaattagtgatgtctgaaatggagcagaccaggagagcaccacgaattttgccctccataggttagctcatctctgaggtctttccctgctctgacatayttttgttccatgattacctccagcctggtggggaacaacattggcagtgtgggtgcccaagccttggcactgatgctggcaaagaacrtcatgctagaagaactctggtgagtttgggggattctctgctctggggaagtggatcacaatctctgttgatcccctggcctcatccataggagcggttgtgtggacagacaaaggtggatgattgagtgattgactgattgattgattgtgtttgtctttatatgtactgagtggtatgaagcttatagagcctggtatgtacatgctaatttttttatttaataaaatatatgggtttgctggtttggtgactgcctccacatggcataagtgttaagagcacagactctgtaatcaa

SEQ ID NO: 390 - DNA, 201 bp, Homo sapiens
  misc_feature (45)..(45): n is a, c, g, or t
  misc_feature (101)..(101): R = A/G
cctgtgcctggcctggcttccctggcgggggcggcaaagtgggcnagatgaggatgccctgccctacgatgccttcgtggtcttcgacaaaacgcagagcrcagtggcagactgggtgtacaacgagcttcgggggcagctggaggagtgccgtgggcgctgggcactccgcctgtgcctggaggaacgcgactggctgcc

SEQ ID NO: 391 - DNA, 801 bp, Homo sapiens
  misc_feature (401)..(401): N = A/C/G/T
tgcagcacaagcctggtataactgaattgggaaatgttttattgactcagtaatgccactgtctctctacaagataactctggatgacttcctataacactttccttcacctttcttgaaactaagactaaatttttttttggcaccctgttgtttgtcacggaattccttaagaaactccttaagtatttatttattgactttccaaggtaccatgatagttaattacatagtcgaaaatcagtgatatggtgtctttcaggacatgactacagagctggaggcatttgcacaccgcccagagcacaagacctctgacagcacgttcctggtgttcatgtctcatggtattcgggaaggcatttgtgggaagaaacactctgagcaagtcccagatatantacaactcaatgcaatctttaacatgttgaataccaagaactgcccaagtttgaaggacaaaccgaaggtgatcatcatccaggcctgccgtggtggtgagtgctgatgcctttgagaacaccagacaatcaaatactatcctactctgtatgcatccaagaatttttggtttcttttggtttgtcttttaatgtcaaagaacacatactgtcagtattcaagaatgcagcttctgtgaattgaatggctggttggtagatatttattccatatttaagcttgagattttgatgtttggaaatttttacaatttgtttgatggttagaaaagataaacattgttgaaaagattgtaactgaaatgcatgtgtctatttgcatgtgaattaatgatagagc

SEQ ID NO: 392 - DNA, 801 bp, Homo sapiens
  misc_feature (401)..(401): Y = C/T
cacagttaaaaaatgctggtctaccaggcatcttactgtacaggctctccttctagctacaactccatgaataggccttcttgatatctcaatttctcttttctttttcctttttttttttttggtagagacggggtctagctatgttgcctaggctggtcttgaactcttggcctcaagcagtcctcatgccttggcctcccaaagtatcaatttcccctttctgtacaacggtcctaagggattatcccaggaaagaccacaacaatttgtttatgctccaatgtacggggtaaactcttagctattgggaagtggtagggcctgcaggaggtagagagtcgccatagctctgattgctggacttctctttgggctcctgtcttacaggccctgcctcygggctcacctcgctgtgacctgaaggagaatctgctgaaggataactgtgccccagaatccatcgagttcccagtgagtgaggcccgagtactagaggacaggcccctcagcgacaagggctctggagacagctcccaggtcactcaagtcagtccccagaggattgcactccggctccggccaggtagggctgggactctttgcggggagagacctgaagcaggtgggcatagagcacaaggtggaggtctgaggaggaagtcttggggaagtagctcagaatggaaatggggtgggaagacaaggatgaggggggaggtgtgggcaagagaatggaagaaaataagagacgttaggacttgagtcagaagatctgaggtgaatctttactgtatcata

SEQ ID NO: 393 - DNA, 801 bp, Homo sapiens
  misc_feature (401)..(401): B = C/G/T
cccgagaatggagagtttctctaattacaggaaacaaaattaaattgggcctaaaggcatttttttttttgtaattgcagttggtttaaaaattgaaaaagaatattcactcaaacaccttggctttaaaaatattggtttgctccccactgttaaaaaggcattgagacctgcagcaaacttcattctaatgagggtccagatgatttttttttttgtagatgtgtagaacaactctgtgggaaaaatgatacctcaaagattaatgatgttctgtagtagggaaaataaaacaaatagtttttatttgaacctttttattgtatgatagaaaattttgatttaaatggcgagtgagatatgcttaccatctctcttttttcctatttatagtagctctbaaggtcaaagaggacacactagcatgaaagccgtgtacgttgaacccgctgctgctgctgctgctgctgctatctcagacgtatgtacattgaggaccatagactacaatcttagacccttatccgtgtgatgttgattatttagttaatgtgtgttaccaagaagtatgtcatatggatgtgacacatgagcagtgttccacagttgccatcttgtagacatttcttattaggagccagtaactgccagacttcgaatggtccctgtagtgcttgaaaaagaattaagctaagctgtatcccagatgttgttcagggtctttttgccttgtgagtacatttcataatggaagtttacttactgacctgcctggtgtagaaagccatgaaggctagaacc

SEQ ID NO: 394 - DNA, 801 bp, Homo sapiens
  misc_feature (401)..(401): K = G/T
ttcagtcacaggcatggccaattattctacaaggaatagatcttatagtagttgcacaaaccggaacagggaaaacattgtcctatctaatgcctgggtttattcatcttgattctcaaccaatatctagagagcaaaggaatgggcctgggatgctagtccttacacccactagagagttggctcttcacgtggaagctgaatgttcaaagtattcatataaaggtctcaaaagcatttgcatatatggtggtagaaacagaaatggacaaatagaagacattagcaaaggtgtagatatcattattgcaactcctgggaggctgaatgacctacaaatgaataactctgtcaacctaagaagcataacctacttggttatagatgaggcagataaaatkctggatatggaatttgaaccccagataaggaagattttattagatgtgcgcccagaccgacagactgttatgacaagtgcaacttggccagatactgtacgtcaactagcactttcttatttgaaagatcctatgattgtttatgttggtaatctgaatctagtggctgtaaatacagtgaagcaaaatataattgttaccacagaaaaagaaaaacgagctctcacccaagaattcgtagagaacatgtcacccaacgacaaagtcatcatgtttgtcagccaaaaacatattgctgatgacttgtcaagcgacttcaatatccaaggcatatctgcagaatcattacatggcaacagtgaacagagtgatcaagagcgagcagtagaggactttaaaa

SEQ ID NO: 395 - DNA, 801 bp, Homo sapiens
  misc_feature (401)..(401): N = A/C/G/T
agctaataaacaacaaatattcaaatatgatactattgatttcagtataattagacttttgcctggatgaagcacagaatacaaaaagaaaagccaaagtggaagattatgcatcacaatgttaattatttcgcatcagggttgtggcagtgaaacttaacacttttttttaaaacataatgcgccttacactattccaattagcaccacttttaaaactcttttttaaaaaagaacctaagaactctcaagattttcctgggaagtatttgtactgtctttaatttgcaactgcaaaataccttgtccagacataatattgcataaaagccgacttgaattttttctttttcatgtaaggggttgtttattaaaaccagctgtaccttgatcagtccagnagtttcagccaggctcaccgctaacttactgtcttcactggccaccatcacattctcctctagagcgtggaactgcaacacctccatctcttgcggggagtacagctcttgctggatactaatggccacacactgctgcaggctctgccggggcccttcctcaagccacagcaacccagggccaggctgttgcaccaccacctgcaccccttcttgctgctgtatgctcagcaagctcatatcctgcaactccacagcttcagaagtgaagtgcaccgtctgcagggtcaggatgtacttctcgctctcctccgagggggccagcaccagctccacttcttcctccaggacgctgtcctggaaggccccagaggtacgctcggcctccaactcactaggg

SEQ ID NO: 396 - DNA, 601 bp, Homo sapiens
  misc_feature (301)..(301): R = A/G
gaggagggcctggatgtggagcctcagataccaagtgcttcccttcaggccgggccgcttgctcagagccagcacacagggatgcccggatcacgggggccctgagagggtcccctgctcacagcctccttccctctctccttctgcctcagatgtgaagttcatttccaatccgccctccatggtggcagcggggagcgtggtggccgcagtgcaaggcctgaacctgaggagccccaacaacttcctgtcctactaccgcctcacacgcttcctctccagagtgatcaagtgtgacccrgtaagtgagggtgatgtcccaggcagccttgccggggcttacagggggagacacctagtgccacggaaatgccgaggctggtgccaaggcccccaagggtgacaaggttggggctggggctgggcccctcggaccccaggccacagactgacagggcaccggcttcttccactgctcctagaacttactgactggctgggaggtcctcacagccttctcacgtcccctggggcttccaggagccgtagagtttctgggcgaagcgtccgggacggaggccccaggcggccccagccaatg

SEQ ID NO: 397 - DNA, 801 bp, Homo sapiens
  misc_feature (401)..(401): S = C/G
aatattacactaaaaggtggggttctttggggagtctgataactccctattgtaagattttgtgtgttggattgtccttttttttttttttaggggatgaggagaccacactttcataggattcttcaagaattttgtgattttaaaaaactaataaccactttcctaaggcatgacagatgctcctgaagtcctggcaggtttctataatcgggtttaaactctcctggtgtgacactgtcctcctgagatagagggatctttccatgggggatttactgtgacttaagtaagcttacccagcgggaaaagcctttgccacacttggagcatttgtaaacagtcgggatgaaatttgcatcgtggtatttcctgaagtgagcgtttagaagttgcttctstcggaaacatttattgcaagaaaggcaggtgaatggtttctctccagtgtgggtacgaatgtgagcggtcatatgacgttcctaagagggaaggggaagaaagcagcttgtctagttcaaagggttttctcgatattagacactgtttatcatacaataccttttatttccctccccaaagatgagtccactattaagcagaattactgcaaacacattctgaacaaggcagcattcactctcagtaagtggccgcctaggaaacaaaactcgtatgcagcagcaagtgacaaaggtcttgcagtggattccttgctggctctcctgtcctgttgggatgtgggagtacacaccgcagggcgtgaaaggatggtcctttgtcctctcattactgggagtc

SEQ ID NO: 398 - DNA, 801 bp, Homo sapiens
  misc_feature (401)..(401): S = C/G
tgtaccttgatcagtccagtagtttcagccaggctcaccgctaacttactgtcttcactggccaccatcacattctcctctagagcgtggaactgcaacacctccatctcttgcggggagtacagctcttgctggatactaatggccacacactgctgcaggctctgccggggcccttcctcaagccacagcaacccagggccaggctgttgcaccaccacctgcaccccttcttgctgctgtatgctcagcaagctcatatcctgcaactccacagcttcagaagtgaagtgcaccgtctgcagggtcaggatgtacttctcgctctcctccgagggggccagcaccagctccacttcttcctccaggacgctgtcctggaaggccccagaggtacgctsggcctccaactcactagggctccgatggtctttctctctgcacactccgtctttttcctcctccttcaggcctttttccggcatcaactcgagttctttgatcttggtgaattgctcagaaaggacagagatctcagtggctgccataatgacttggcctgtttgaaaaataagcaagcggtttccataggggggagaagggggtggtatgaggagggatgcggggggtgctggaacctagcaggctttggagttgaaacaaggtctggcctcaaaaggttttggacttagtagggtcagaacaatgctgatctggcttgggtctaggagggggtcaaggctaagcaggatttaggctaaagcaggattttgtacaaaaccctagaacgaacaggtttgg

SEQ ID NO: 399 - DNA, 601 bp, Homo sapiens
  misc_feature (301)..(301): Y = C/T
tgggaacccagcctctcctattcccaagacacccaaactcccagcccttagccctcccctcctcccagactagcctggttctccaggctcctcctcctcagaccctggagttccagcctccagttcccttctcccccataatatcaggaagtggaaccttctctctttagccctcagactcaggaggccaggcctcccctttcctcctccagcaggactcccacctagcctgaaggtcggatggatctgagcttctcctggcattccctacctcctctggcctcccggggggccagccacyccctagaggagccccaggcttctgattccaaggtcgggttttcttccatggcccaggctgggctgtctctagtggccaccaggcagacactgccccaggtaagggaggggccaggggcaggtgtgtacctggccagcaggtggcccggagggagtaaggtacacttcctgtggtttctcagggccgctgatgcgaaaggtctcctgggagctgaagtccccgtggtgccccgggcctcacagtttggttcctgggctgggcgggggggctgtacctcaccctgggacttggtggactaag

SEQ ID NO: 400 - DNA, 998 bp, Homo sapiens
  misc_feature (500)..(500): Y = C/T
acaggacccttagaggaaactggggtcacagagaagccacctggggcagcttcgggtggagtaagggaagatcacccccaagcgtgatcccttggcaggtgtgtgtggcagttcctgatcgggagcaagctgctgcccctcctggcccggattcctgccgttccactcagccaccaccactcccaccaacccctctagaaggcctatgtcatattccaggcactcattgaatcctcaagacaaccctagaaggcaggaattattgttacccccattttacagatggggaagcaaagccacagcagtgttcaccactgtgctatattcctcccttctcctctgaggctccctgccacctctctagcaccccctaggtcccctagcactcctgggtccacgctgtcctcaaccccatctccctcccaggcaggccctaacttgctggcctccttcaggagggcgatggcaatacgaatccgctgccgcaggaagatgagcaycagcagcaggatggcttcaagcaccgccaacacgatcactgcagaggacggggcagacagacctaggtcagggccagggctggggccgggcatggcccagggcggtccttgggcagctggtggcttgggggtgggcaggacactcacgggcggccagccaggtctcctgcacgctctggtaggcactgaggttggtggtgaaacccagctgggagatggaggcgcccttgtcccgcagcactcggtactcctcccagcagtagtagatgccgtatgccagcacgcccagcactcccaggatcagcaccagcaccaggggcccagccaccaggcgcagaagcaagataaacagtaggctcaagaccagagccacccccagggcactgtaggcagggtgaggacagtgaggttcagccctagcccctcaaatctttccccttacagaggccctccctgcctttccacacaccacccaatgtccccagattaggctctttc

SEQ ID NO: 401 - DNA, 741 bp, Homo sapiens
  misc_feature (401)..(401): S = C/G
ggcaaaatgagggtgttggggtctgaagtgtggtgctgaggaggctcaggctctggtcttactcctcccctgagccagatatgcttcacctccaactccctcccaggatgggggtcccacctcagccctaccctgcggccctcgggccttcccctctggctggtcctagagccagagatttacctgtcacatgcacagagagcttgtcatatatgtagttccatttcctgcttcctctctccacctggaagtagtacttccctgaatcccccttcctggcatctctgatgctcagggagcagttgttggtctgtgggtccccaaggaggaggaatcgaccstgggtatcctcttgcacttttccacttggggtgtttgtggccactggaatatcccatggtatatcggccccttccttgaaccaggatccataaacagggctagaggcagtccagttgtaatgggggtaaaggacactgcagggcacagagacacacagaccctcctgcacagtcaccgactctggcacctccagcctgtatcttgacagtaggtcctgggacgctgtggagaaacgagggtcagcccagcccccactgtccctctcttcatttgcccatagcaggggcagcagcatctctgaggcagaggcttcctgggctccctgtgtgagcagagaagggggagggagaggaggggcagggctgtgggacccacagggggctggagaggagctggaga

SEQ ID NO: 402 - DNA, 690 bp, Homo sapiens
  misc_feature (201)..(201): Y = C/T
agaccaagttgggctggaacttggttccctgactcacattggctaccactcccacctcactgcccctcactccacctctggacaagaggtccacacattctgtacctgatttacaagctgtacatgggaggcaagcaaacaaattgttggaagcattggtgtaacccacaccctctgtgcaccggttacaggctccaggaygttctgatctatgagatcctgggaagggagagaaaagccaatgaatgaattgccacagagttcccagaggatcgtggcggtggctaggaaactcttcttttggccatcagtagaccccagacagagaaatcccatcttcttggcttggtcttgtcgtcaattctgcatctatacacacctctgactggcgctgctgacagaaatacaatacaaaccacatgcaaaattcaaattctatgagagccatattaaaatagtaaaaagagaatgaggtcaaattaattttaacaatgtactttttggacctaaaatatccaaaacattagcatttcaacatgtaaacaagataaaacattgagatattttcttttattttgaatactaagtgttcgaaacccagagtgtatttttcactcactgcacatctcaattcaaagtggctgtgttttaagtgattaatggccacataggcctagagaccagggcaat

SEQ ID NO: 403 - DNA, 801 bp, Homo sapiens
  misc_feature (401)..(401): Y = C/T
ggtggtgccgcggggttaggatgctgagcctggcggtgctgtacgtgggcccaaccttggggtccagatgcactgtgttatggcagatttgaccctggcaggttggcccctggcagggcaccatgggcatagctgaccgcatctgaacccccactgaatgctccatctccttggctgagtgagtgatgatggatgctagctcctgaaactcgtagaaggttccagaatgcccctcaaagaccaggagcacatccacaccagccacggcctctgcaggctggaggctggccaagtgaatgttagcccgtttgatgtccagcttatggctgaggaacctctgcaggttccgccagtggtcactcaccagctcctcgggggtgagctggtagaagcccatccayatggcctgctgcagagcctcctgccccacatgccacacgtacacatggaccccagcagtcgtggtgaaggtcccatcgctgaccgtgacgttgaacgagtagtggccacgaggcaggccctgggcggcgataatcttgccatcaggcgcacccactgagaagtgcctgcccagggtctcctcttctgccaggctataggtcagcgtgtcctgggggtctcggtctgtggcatggatcttacccaccatgccaccctggaactcatcctctccaacagtgatgaagatctccagtgggagagcagaaggtgcatagtggctctgctctgtgacatggacacggacagacgtcaaagacgagaggggagggatgccactgtctgacgcctgtgggcaaaaca

SEQ ID NO: 404 - DNA, 801 bp, Homo sapiens
  misc_feature (401)..(401): S = C/G
acaggcagagataaacacagtcatcagctccttaaacttgattttattgtaatcatcgccatcagtggtgatgatttgtccaatttggtttctccatgtgtgactaatcctccccactgtcctgtgaagatccttcagataagcctaggtcttcatcctcctgtgaggatccttcagatgagtctagatctttgtcctcctttgaaggtccttcacatgggcctaggtcttcatcctcatttgaagatccttcagataagtctacgccttcgtcctcctccttttggattggattgatggagttctcttgggactgttcattctccagttgatttgaatttattttcttacccttcctgaggtaatacacaaatattattggatattctgatgtttttgtsttcttcaaactctgttcgggggctaagactctgtttggtacctcttgcatctggtaagaaaatagggagaggccagaaagacattattttgggtgaataggatagagactagatagcaaggggggctttatgagaaggaatgcaggtggaggaaggggtgtgtgccagagaagaacaaggtgaaatcatagggtaggtatctatgcagaagaagaagaggagcatgggtagagtcacctgttagtccaaactgcatgattttgtaagtttttgctatgttgcagaccttggtcaaagtgaaacattccatgggggttcaggccatgagcaacatcctgcctaaccacctgaccacaaggtggacaaaggctcaactaaagaaacatccctatcataagtc

SEQ ID NO: 405 - DNA, 401 bp, Homo sapiens
  misc_feature (201)..(201): M = A/C
gagggcactttgtcttccaattacatgctgatttgctaggtggctcaatgacaaggtaattaaggcgaaggaaacaaatgtagcaggcacagcgtggggtggacagtcagctgtcggtggcttctgctgagatggccagaggactccaggttcccctgccgcggctggccacaggactgctgctcctcctcagtgtccagmcctgggctgagagtggaaaggtgttggtggtgcccactgatggcagcccctggctcagcatgcgggaggccttgcgggagctccatgccagaggccaccaggcggtggtcctcaccccagaggtgaatatgcacatcaaagaagagaaatttttcaccctgacagcctatgctgttccatggacccagaaggaatttgat

SEQ ID NO: 406 - DNA, 602 bp, Homo sapiens
  misc_feature (301)..(301): K = G/T
  misc_feature (311)..(311): n is a, c, g, or t
taacttttcagagagggagaagcagacttgtggagctgaagagaaacacccagaagctcaggtgaaagctgacacggccatagttggttcatattaaccatgtgattaaaatggttaaatattaatttgggttcttacatatcaaagggtaaaattcagagcaagggagaggtagacaggacctgtgaaaagcagtggttagtttagggaaaatacctaggagccctgtgatttggagagtgaaaactctttattaccgttgttactttaactctttccaggatggcctgcctccttcgckcatttcagangaatttctgcaggggttttcttcttagcwctttggkgcatggttgtaggtgacaagctgctggtggtccctcaggayggaagccactggcttagtatgaaggatatagttgaggttctcagtgaccggggtcatgagattgtagtggtggtgcctgaagttaatttgcttttgaaagaatmcaaatactacacaagaaaaatctatccagtgccgtatgaccaagaagagctgaagaaccgttaccaatcatttggaaacaatcactttgctgagcgatcattcctractg

SEQ ID NO: 407 - DNA, 601 bp, Homo sapiens
  misc_feature (301)..(301): Y = C/T
cgttgaagatgccgcatctcaaattccaaggtatccctttcattttctatgcttcttacgtaattttctaaaagtattttgtcttcagtaagtctactgatgctgttttcaaattttatattttcttgactatgtttctttagttcttcttttagaatctgattatctgttttggtttccattaccatttttgataacatttcacattccttgccaatttctgacaagctattcttataaatacttgcttctgattttgcattttttatttcttgcagaaaattctcttcggcagtagatyggtaggtttgaatattctcaatttctctttccataatttgtctggcagcagtagattcttgtaatgttgtttcaaggttgagtttttcatctttaactgtttctattatttgaagaagtgtctcttgttccgtttttgccaatctttctttctcttttagctggattatctctagctggctttcttttagttcatttccaagtgagcttttttcttttagaagctggtgtgtttttttctctaacatttctttttcatcttgtatcaacagaatattggttttcattgcttccatttcta

SEQ ID NO: 408 - DNA, 801 bp, Homo sapiens
  misc_feature (401)..(401): R = A/G
attgaaaccaaactctggaaaggacccaatgtaccagtatttatacctctaatgaagcacagagagaggaagagagctgcttaaactcacacaacaatgaactgcagacacagctgttctctccctctctccttcccagagcaatttatactttaccctcaggctgtcctctggggagaaggtgccatggtcttaggtgtctgtgccccaggacagaccctaggaccctaaatccaatagaaaatgcatatctttgctccactttcagccaggctggagcaaggtaccttttcttaggatcttgggagggaatggatgcccctctctgcatgatcttgttgaggcatttagctgccatgcacctgtccccctttaatactgggcattttaaagccatctcragaggcatcttctacatgttttgtacgcattaaaataatttcaaagatatctgagaaaagccgatatttgccattcttcctatatcctggaatatatcttgcatcctgagtttataataataaataatattctaccttggaaacttgtgtgtgtgttgagtggaagaggtttggaagcagtaatgtgggtaagagaagctggtccactgggtgggttccagcctggatttggcacgggcttcctgaaagctgggccccctcctcacaggttcagtcctaagcagggctgcaggcagaaccaggaatactgacctcagctacagacactcaggagactgcccttctctggccatgtccaatcttttcttggttgtgccatgctcctgggtcctggtccagt

SEQ ID NO: 409 - DNA, 501 bp, Homo sapiens
  misc_feature (251)..(251): M = A/C
aagtacaccctggcctgagagagtttgaccttcctgatgctcagccggcccaggaggaagcagagacgggcatgggcccaggtcatgtggctcttcttggcccactttcttgatgcctccaggtaggccacaaactcatcctcctcagagaagctataaaaggaagaagtgaggaaagagaaggagaagtcatagagactcttaaagtggtcagcataaccctcatgatccagaaaagccaatatgggggmgaagttctcagcctcctcctcctgaccagtgcttaggtccatgagcagttccgggtcatcaaggtcatcaggctccggcaggcgatagctgtctgaggtggccgagaggagctcctcctccaggctggagtcctcagagctgctggactgtctggaccccacggcctgatgctcctcccaggctctgccaggcctgacctccttgaaaccttcaggctgggatgctgtaaggacaggcaaagttgagcaa

SEQ ID NO: 410 - DNA, 601 bp, Homo sapiens
  misc_feature (301)..(301): R = A/G
atagacatagcgctcatttgtatttgggaactggaatgtcttcttcaaaaaggtagaatttaagctgcagagttttaaatttcttttaagaaagggagatgagaaaaaagatcattttagtggaagtaaatggtataaaggtgaaattaaagggtctttttggggatttgaggtgtttttaaagtgtttgtactaaaactcaggacaacttagatatttttccatctatacctaatgactgttttgtaacatgaagatcggaagcatctctactcatttattttactttttccagcaagcrgcgtttttcagaggaaaacagtaaaacagatcaaaatttgggaaaagctgaagaaaaaactaaagttaaaagagaaattgtggtgagaatcagtttgatcaatctagttacaacttgtgtgtgtgtgggggggtgcgtgtgtgagagagtgcatattacatagtatgcactttcaatattgtttaatattttccacactactagtaggtttgctggaaactaatttctagttattattttgtgaaacttagattaaaaaattatggcattacaatttctagctgtatatggaggcaatta

SEQ ID NO: 411 - DNA, 601 bp, Homo sapiens
  misc_feature (301)..(301): Y = C/T
tggtagaaagtcaagaagggaagagagcattggtacctttgatgctagatcacgtttacatttcaagtggcagatgctctgggcctggtcacccaagtcaatgccttttaaaccaaaatccctccataaagctgtcaaatatgtctcttaactgaaaagcaactttcaggaaataataagtgggcccacattactaagtaaatgcaaagcaccctgagaccctacccccactgcatggctactgaatgctcaccacaatctattcttgctttccaggggagatggatcctatcttactaaycatcagcattttgagttttttctctgtcgctctgttggtcatcttggcctgtgtgttatggaaaaaaaggtgaccttcttcaactaataaagagggtgattgtgtgggatcacggacagtcagagcttaagccccatttattgatgagaaaaccacaaaggggattaaggcatttcacgaatttagtgcccagtatccctatctatcctcagcgaatttccacagttaatttcataagaggcaaaaagatattaactggacattaggcaaacgctgtccccaaagtaagaattccgtaat

SEQ ID NO: 412 - DNA, 801 bp, Homo sapiens
  misc_feature (401)..(401): R = A/G
gctgcttgtaggaaaggcccataagggaggcaggagggacgggagcaggggatgagggcagaggacaccctacaaatggatcagagaactgcagatagaaaggggtagcagggagcagggagggcaacaggacccagggggccatgagaaaggaagctgaggaagtaggagggaacttggtgtccttagatcattggagtccacagtagctgggagggttgacagagaggaaagaaccctgggaacgggaggcgaagggataatgagctggggatgggagcagtcgcaggaagaatcctctgcctggagccggcaggctccaacccctcagcttgagagtcaggagccccatagtccccacagcaataggaagcaccagctcctggtcccgaaaaaaggarggccccaactccagggactgcggcccgccctggagctgagaacacgcggactccagggagaggacagggcttcagggacccgagagccgctctgagcaccgggggatgtgactgcctcagcggcagagctggaagggccctcgaatgccattcacaggaacagcccaggaacccagggacttcagaagggctggtttgtccgaaaagtgagaggaggcggaggagaggtgaggagagcaagtgcaagaagagaccagaaagtgcagggggtgggggtgatgcgcgatcccgaggaggactgaaaagagactgaaaagcagggctgaggagtggcggcaaccggcagcgtccagctcccgcacctcgctgcacatcgcacctgagccccgccgcgaccgca

SEQ ID NO: 413 - DNA, 801 bp, Homo sapiens
  misc_feature (401)..(401): S = C/G
aatttcaatgagaataatgaatctagcacagtacctgacacattttagaaaataagtatttgcttaataaatgaatggtgatgggaatcgtcctccacaaagccgaacaacatctattattgtgcatgggtggggttgcctcttaaaagttattatttattgcccacactggaagaaaaaaaaaaaaaacagccgagcccaaaccctagtttgtgcaagtggcgttaggaacttaatccaaacccgaagaaggaagactcctgcgaatcccacacccaacatccatctacagtgagaaaggcgctgttggcctccagtgcccgccccccaccccgcccccctccgcgcccccaatgctccgcagtcttccacctccgttggagcactcacgtctctggcgstgggtgcaggtgaggcccgggacgaggagggaagagcagcctcgacagagagtcctcttcaccgagggatccctgggggcggaggaggatagtggtctggcgcccgcgctccctctcgcgttcctcccgcgtcccgcccgccgcccgccccgtggctgtctcaccgccgcaagacgagccgcttcgcaatggtcctctcagtgtagcagtaaaacctcgccagcgcctggttctcggggtcctgggcaaggacacaatgggcggcctgcgggaggggagcagtcactctgggacgccgagcaccgtccccgtggggcccttgtcgcagactcacctggtacaggaagttgagcctctggaaggcctcgcggtccttcaccggccccgccatcaccgccgc

SEQ ID NO: 414 - DNA, 601 bp, Homo sapiens
  misc_feature (301)..(301): W = A/T
gttgttcccattttcctgatgaaccaaccgaggcctagaaaaattaaggccccacgtttgtggcatgagttcactatggagtgccctgtgcatgtaggaaatcgaatccttctccatttcttgggggttttacttctttctggaatccttgcatttattcttacgatgtccggtcggttttctgagcattttttgcagctctggaggtgagtggggcgcgtgcgttggctctcgcagctctgcagctcacgcaagggcgtttctacccttcttcccacagaaggacttactcctcagtgawattccaagcagcaccgcctcgctctgctccaggaagacgggcgtggagaacgtgatggcaaaggagatctgccagaagtacctggagaagggcgcagggaggcttccggaggactgcgccgaggccctggccacggctgcctgcctgtgcctgcggaggcgtaacaccagcctgcaggaggtgagcctcgcccgcagcggcctcgctgcctgggccacgcgtgggtccacctcatcggggacggccccttcgcagaggcctggtgcacaaaccagggttgtgcttgcttgcaagccgcag

SEQ ID NO: 415 - DNA, 601 bp, Homo sapiens
  misc_feature (301)..(301): S = C/G
tctccagcaactggaagaatcacccctattaaaaagaggtagctcaaaagtaggaaaaagttcttgttggtctgcccttacagtgaacacacataactctgtatcgcccaccaagattacagacctttaacaggccaaaggtccctgggcttagccaaaccaactgaatcacaacagccttgatatcatcatgtggctgacaaaatgtaggaaaaacaaacaaacagacaaacaaacaaacgataacaaacaccttccatcccctaccccctgacccataaacaccttttatcaggaattscagagtatcttctttgaggccaggatctatacttcgaaagtgactatgagggaaagaaagtgtgggggtgagacaggaaggagcctgcagagccccttctaacagatcagatctaacccgtggaatcgaatgtttaaaaatacacgtgaaattgttcaactgaataaatacggtggcaagctgggtacatgctcatcagagatatcaatatccagaggcatttatcagtgaacctataacttggaatttcaggactaacatgcacagttaggacaaacagtcaccagttctttttaaagt

SEQ ID NO: 416 - DNA, 1114 bp, Homo sapiens
  misc_feature (201)..(201): S = C/G
cacggtatagcattgagcagaatgaatttgaggagtttcagagtttttaatgaaaattttagctttctacctatgatataacttgaaataaactgattcttaatagatatgccagattttttttgaataattctaattgttaccctagatattgaaacccccaaggagtcctcttcaggacctcagaggtgggaatgaaasagttcaggtaagtcttttgtgcaaatactttatagatgactattttcagttatatttttaagtcaagaagtttattagctatttgaagaggaaatgtgtaagcatcccatgagtttccaaacacttgaatatactggcattcttgatttttcatttttcttcttttttctaggaatggcatctccctctcttacccaggttggagtgtagtggcacaatcataagtccctgcagccttgcattcctgggctcaatcaatcttcccgcctcagcctcctgagtagctgggactacggcacatgccatcatacttagctatttatttatttatttagaaacagggtctgactgttgcccagactggagtacaatggtgcgatcatggctcactgcaacctcctccccctgggctcaagagatcctcccaccttagcctcctgagtaactaggcctacaggaacatgccaccatgcccggctaattttttattttttatagagacaggatttcgccatgttgccccacgctggtcttgaactcctgggctcaagtaatccacccaccttggtcttccaaagtgctggcattacaggcgtgagccactgtacccagcccttaaaaaatttttgtttttagtatagacagggtcttgctatgttggctgggctggttttgaacttctgggctcaagtgatcctcttgcctgggcctcccaaagtgtgggtattataggcatgagccatcgtgctgggcctttcttttttcatgtcagatgtataatgtgccaacatcgtaacaaagtttgaagaaagcacatctcacacatgcgtgtgaaaacccaatcacacttatgaactacgaaaagatcagtattcttttttttcagtaagaaatatattagtctctgttagtc

SEQ ID NO: 417 - DNA, 701 bp, Homo sapiens
  misc_feature (501)..(501): Y = C/T
ttttcctttcttactttttttttttctttttgagacagagtctggctctatcgcccaggctggagtgcagtaccacgatctccgctcactgcagcctccgcctcccggattcaaacgattctcctgcctcagcctcccgagtagctgggattacaggcgcctgccaccacacctggctaattttttgtgtgttagtagagacggggtttcgccgtgttggccaggcttgtcttgaactcctgacctcaagtgatccgcccacctcagcatcccaaagtgctgtgattacagccgtgagctgccctgcccggccccaaattcctattttctcatttctcagtgggaaaactcaaggatgagagacagccaacacgggctgggagtcctagagcaagacctggtggagaggcccctggggaggcacagaaggcggaagagttggagtggtgagattcctgggcacaatacctgctgttccagcttctgcagcctcatagcagygagctcatgccccaggatgctgagagagacacaggcccatggtgacagtgcacagggaacctcggttgcccaagagagtccctccttcccccatcctgcccctatctcagcttgggttctgggcacctgtgaggtcacaggaggtgcagaacctgagcctgctccaccagttatagggccctttctcctggcactggccc

SEQ ID NO: 418 - DNA, 601 bp, Homo sapiens
  misc_feature (301)..(301): K = G/T
cagtcaatgataagtattaaattgaggaagcagaaaaagtaaacagaaataaacaactttcagaatatatttggaatgtttaactgtatgcattttttattttctttatttttgattcttaaaattttttccaagaaatagaaatacttgaatctcaaattgaacagtgcattataaaagactgattgcattgtttcatttacaagtccattaattcacaagcaagtgcatttgatggaagaaggcatcttatgtgttctttggtgtacatgtgtttggattaagaaacacttcctctctktctttaagtacaatattatacctgcaaagtggtggtctgagaaagagaaaaatggagagaacaaaaaaataactattagtaaaacaacagagttgatttccttctctcattaatattagaatagtccatgcctgtaactagctagttctctaaatgtagggagttggaacaaatatatgggatcatttccattctatctcatttggctgtgtagggatgaaatagacataatgcttataagaaagaaaaaaatctgtttcaacttcttttctcactgctttattggaaaacttaattgta

SEQ ID NO: 419 - DNA, 548 bp, Homo sapiens
  misc_feature (514)..(514): R = A/G
caaggagcgggcagcccatcccctactgcatctgagatcagagcacggagctcagcagcaccaggctgaattccccatgagtcctgtgacctcagtgcacggggggacctacaggtgcttcagctcacacggcttctcccactacctgctgtcacaccccagtgaccccctggagctcatagtctcaggtgaggctcctgaccctgtcctctctgagctcagtggctccgttcatgccctgctgccaggagagctctgggcagggatggagggagaggggctcagccagtgggggactcagccctcagaggggaggaggacaacaggggccctcccaggcatgcccatgctcttctccctcacctagggtccagaaggtgccaggtggacagagaaatggtccttgggaagctgcagggcagatatagggagaggttcaatttgatgtggagacccaagggcaaccccagactctcaccctcctcttgtccttctacccaggatccttggaggrtcccaggccctcacccacaaggtccgtctcaaca

SEQ ID NO: 420 - DNA, 729 bp, Homo sapiens
  misc_feature (334)..(334): R = A/G
tgtcatctcctccaggaagcctcttcttttttttttttaaattttattattattatactttaagttttagggtacatgtgcacaacatgcagatttgttacatatgtatacatgtgccatgttggtgtgatgcacagaagccttttctgacctgcctgttttctatacactgctacacattatagaaaccttcaagccccagctcaagcgccaacaagcaataacaacctaatgggcacttcctaatgccagactgggcaacagaggttttttaaaaagtgaaaaacaaatgttcctgccctcaagaggaacacacagcagtggcagggacagrcagctaaacccatgatcatgatagagtgagatcaatgctggaattgaagtattatgtagaggagcagaagccagtggttcagcctgtggaagtcagaaagggcttctcagaagacgaaaagcctgaacttattattgacaacagagaaaagggtggatattcagacaagaagaataacatgggctaaagttggaaacggcatgaagagttcattatggtcacaggacaaagcttgtctggggatgagcagaaggtgcaagcggatgctcttagcagcaagggccaatgaaacataaggagcaaactggtatgactgagttcacatttgggggaaatttaggggatggggaggatgggttcaggagaaatgtacccagagacttggaagaagactt

SEQ ID NO: 421 - DNA, 1706 bp, Homo sapiens
  misc_feature (692)..(692): R = A/G
ttctgttttttcctctcaggaaaaactgaagcctcagtacttggaagagctacctggacaactgaaacaattctccatgtttctggggaaattctcatggtttgccggggaaaaggtaggaagaagggaaaagaagaggatacttctctatctctgcaggctactactcctcagacctaagcatcttattgcttttcttctagctcacctttgtggattttctcacctatgatatcttggatcagaaccgtatatttgaccccaagtgcctggatgagttcccaaacctgaaggctttcatgtgccgttttgaggtgacgtttcctgcacctttctcttataaaaacactcacaggctcccctgggacctgcaggatcccatagtggaggattcttccccggcttttgcctaatgggatcaatggttggacacctctagacctttaagtcttgggaagagcctaacttctataccttggaggcactgtctacaaaaaaatggaggaggtagacgcaggcaacacgtgaatgttgctgttctggtatgcatctgttggactgggttggggtcgttataagatttggtgtattttcctttcaggctttggagaaaatcgctgcctacttacagtctgatcagttctgcaagatgcccatcaacaacaagatggcccagtggggcaacaagcctrtatgctgagcaggaggcagacttgcagagcttgttttgtttcatcctgtccgtaaggggtcagcgctcttgctttgctcttttcaatgaatagcacttatgttactggtgtccagctgagtttctcttgggtataaaggctaaaagggaaaaaggatatgtggagaatcatcaagatatgaattgaatcgctgcgatactggcatttccctactccccaactgagttcaagggctgtaggttcatgcccaagccctgagagtgggtactagaaaaaacgagattgcacagttggagagagcaggtgtgttaaatgggactggagtccctgtgaagactgggtgaggataacacaagtaaaactgtggtactgatggacttaaccggagttcggaaaccgtcctgtgtacacatgggagtttagtgtgataaaggcagtatttcagactggtgggctagccaatagagttgggacaattgcttactcattaaaaataatagagccccacttgacactattcactaaaattaatctggaatttaaggcccaacattaaacacaaagctgttgaaatattgatgaaaatgtaagaatttttgtgaccacggggtaggagaagtttctttaaagacgtaaaaagaaaaaaaccataggctgctctgcctgtggagtagccattctttattcttttactttttaaaataataacaatcacaaaggaaagatttgccaattgaataggatcaaattctacaacttttcctaaggcacccacaaataaatgacaagtgagacaaaaagcactagtataaagattatataaagacctataaatcattaagacaactgagtttttaaaaatggacaaaatccatgaacaatttataaaatagaaatatagccaaaaatgtctaaaagatgtttatgatgtaaggaattatcaattacaacagtgagaaaccatatttccttctatccgatgagtaaaaagtttctaaagtgttggcaaggctt

SEQ ID NO: 422 - DNA, 801 bp, Homo sapiens
  misc_feature (401)..(401): Y = C/T
tttcctacccagtggggaggagctgcaccttccatttctccattccggttaccactcgcttccgatgacaggccccagctgagagcgcatctcaggtggatgtgtgtatactttccccctaacttcctgtctttgccgtagattaccgtaagaagtacagaaagtacgtgagaagcagattccagtgcattgaagacaggaatgcccgtctgggtgagagtgtgagcctcaacaaacgctacacacgactgcgtctcatcaaggagcaccggagccagcaggagagggagcaggagcttctggccatcggcaagaccaagacgtgtgagagccccgtgagtcccattaagatggagttgctgtttgaccccgatgatgagcattctgagcctgtgcacacygtggtgttccagggggcggcagggattgggaaaacaatcctggccaggaagatgatgttggactgggcgtcggggacactctaccaagacaggtttgactatctgttctatatccactgtcgagaggtgagccttgtgacacagaggagcctgggggacctgatcatgagctgctgccccgacccaaacccacccatccacaagatcgtgagaaaaccctccagaatcctcttcctcatggacggcttcgatgagctgcaaggtgcctttgacgagcacataggaccgctctgcactgactggcagaaggccgagcggggagacattctcctgagcagcctcatcagaaagaagctgcttcccgaggcctctctgctcatcaccacgagacctgtggccc

SEQ ID NO: 423 - DNA, 801 bp, Homo sapiens
  misc_feature (401)..(401): Y = C/T
ccattcagaggcctggaggatcctatttgaatgagattgtgagagatgggcactaccatcagtttacaggcaaaatggagatttcacaaatgctcctggagaccatgggccccgacctccacagtggcagccccaagcatgagcctgtcctggaaggaggctggctatcgtccaagagtcagagggtcaggcatcaggtgatgactgtggacatgaagaaatggtgacatgttcaggagctggcaggcccgaagatgcactgggtagacccagtgggggcctggacaggttggaggaaggagagagaggaggctgaggtgagcctgaagtgaggtgtcccagggatgaacaggtcagagcttctgagggggctgaagaagcaattcactgactcctttctycaactggggataaataacctctaatttctgtggagcactcctagaaacaaagaaatctttcatagattaatatgtattcatatattccattggctcttccattggccatgtagcatcaagatacaaaagctaacggagcagtgggtctccttgacctctgtgcatgtctgtgttgtgtgggtttatatgcacatgtgggaaagaagaagggacagctcgtacctgttcagtaagtcaccagcattctaggagagagaaaaagtgagaatcataattggttctcaggttcctatcacctccaaattcctttcccaattcactcttggaggccactctggggtgccaccttgagaactgggggaacatagcaacacccctcttctgtgcccattctgctgca

SEQ ID NO: 424 - DNA, 801 bp, Homo sapiens
  misc_feature (401)..(401): R = A/G
atgcacatgtgggaaagaagaagggacagctcgtacctgttcagtaagtcaccagcattctaggagagagaaaaagtgagaatcataattggttctcaggttcctatcacctccaaattcctttcccaattcactcttggaggccactctggggtgccaccttgagaactgggggaacatagcaacacccctcttctgtgcccattctgctgcagcagcactctgtagcctggaacaagccacatctaccacaagtcaccacatatcacacaggcccctccctcttacacctcccagaagggtgatgcagatgggctgcctcctatcggggagaatcccagcccttggggaaggcctcagggtatgcaccttcagtgtgttggtgtctaattccttggccrtcctttccagatcaatgaccaggcttctgagctgtgttactgccctggagatgtcaaggattctggccgcttctgctggcatgtgctccagctggcccagccactgctgagggagggcacccagctgttccctggtttggtgctggctctccggcccagcctccagcctgtggttcccgtggtctacctgaaactacaggaaaggggctccctaagactcagtgtcaggtggctccctcctggcccttcacagtctctgaatgtctgagcaggaatgctgattcctcagtcctcttgccctcatggtgttgcctctgtgtgtcacaggtatagcagaagcagctttgattctcataaaggcagggacacctcacctttccacctcactctctgaatatct

SEQ ID NO: 425 - DNA, 1153 bp, Homo sapiens
  misc_feature (218)..(218): Y = C/T
gataaaagatggaagctgttactgtgctcaccaaggaatgagcatctgagccagtgactgaggaggtggcacctgacctggcttcagatgtacatgggtaggaactggctactcacattagatcaggaagacaaacttctcattggaccttttgtcttttcagccaaacctcaccgcaagacaccttttagagaagaacaaaggtcgccagtcatccygcacaaaaaacctgtccctggtgtcctcgtcctccagaggcaacacgtctaccctccgtaggggcccagggtccaggaggaaggtgcctgggcagttttccatcacaacagccttgaacactctcaaccggatggtccattctccttcagggcgccatatggtagagatcagcaccccagtgctcatcagctccagcaacccctctgtgatcacccagcccatggagaaagcagacgttccttccagctgtgtgggacaggtagggaagaaacgcctgggatgagggcactttggagttgggcaagtgattcataccatgtcacaaccaatatttgatgtttagtacttgctaagcacccagaatgccctactagtaactaatgccatatgtattccatgttagaattgtataaaccttttatttcatccttgaacagcctgtgagttaggtgttattactattatccccattttacagttgagcgaacttaggtttagaggggttaaacaacttatccaaattctcacagatacttttctttcccttgctgagtgccatgatatcgttcctgtcccttagagaacttccctctaaggagatgatggcacctattttctcgagagtgttttggcatcacaatctgagattcaatatcccatcctctggcaatgtattagacatcagatggaaagaaagcaaaagaaacaaaaagaaactatgggttattgaatgttctcaggactggttacctacatttataggacccagtccaaaatgaaaatacaagtcctatgctcaaaaatgatcaagaatttgaagatgggaacagcagagcattaaaccaagcaaagagccctgtgtggctatgcaaggcacaaaccggtgaagccagccctgggtgtttccagatggagtacctaataagataatgca

SEQ ID NO: 426 - DNA, 1019 bp, Homo sapiens
  misc_feature (514)..(514): Y = C/T
caatatgataagtgttcacaaaaagtaggtcaatgccagtgtatcacttactttagtcactagcagcaaactatgtaatttttacttagttctgtggcttagtaacgttaagccggaggatatatgtgggatcattttaacaagggattagttttaaaagcatttgacttgttgttatttagttccttctgtgttatatttgcatcatcaccactcagcacatgatttattgtccttttaaactatcttaccaaagattttttaacaacttgtaattttctgcaattcacctagatttgaaaatgtgatattaaataacttagtggtaacttttagcttaagtcttattttcttttagcacccatcattagctgtatatgccattaaatgtttgcttttcttctttgtcttccagtaattatttaattagggaaagtggtaactaaccatgctgaattctctttcttaaatttctgtttttaaaagcttgcaatctgagggaaaatcaggtggyaaagccttgtaatgagctgcaagatcttagtgagagtgaatgtttgagacacaaatgctgtttttcatcatcggggaccacgagcttcaaatgttttgctccatttagagatggtaagttattcctctttcatttatttctattttttaatattaaataaacagatcgcagtggcataagttcatatttggatttcctagcttaatacttaaatgggactcccagtcctagagcggtgctccttagaaggtcctgaggtggtcatgactctggtcaggagcagtttttgcttagcctttggatggtgactttggtaatacaaaaattagtctcacattttcttttgctttagtcactctctgtgttttgtccaaaagtttccaggctctatggaaccctcaatggctgagagaagataccggttgggcatgccttagcttacttctctttgcccagcttttcctcctaggtagaattcttcccatttgtcttgtcttcatctcag

SEQ ID NO: 427 - DNA, 601 bp, Homo sapiens
  misc_feature (301)..(301): W = A/T
gttgtctttctttgtctttcatttcatgttttgtttggtcgaggaaggacagtgtgtatcttggaactctggaatggaattttaaatctgtaatatttttgccagtgatgggaatttctttattgtttttctcatttttctttcccctgtgcatttcactcttagataactttttacattttctacaaaaatgcacatggaattttgacacagtttccctgaaggggagtaatttcttcactaatgcctctaattctgaaattctctttgattttatatcttcatttaagttaccgtccawgttttcttccttaataaagttcattttatcctggtgaataggggacatgtcatatttaccattcctgtgaacatctggatcagtttgtaaagtctgaagttcatttgtaagtgccacttcccccatcatgtgacttttgaagctcttctttcatttgtttgatagaatggcaaatgtcatctaaattttcacaaaatccatgcttgagaaaaggcacagtaattttggatttatccagaattactgtatcagcttgagacatcacatttggaggtgcagtaggtagaaaacgataaaagt

SEQ ID NO: 428 - DNA, 501 bp, Homo sapiens
  misc_feature (251)..(251): K = G/T
gttcattttatcctggtgaataggggacatgtcatatttaccattcctgtgaacatctggatcagtttgtaaagtctgaagttcatttgtaagtgccacttccccatcatgtgacttttgaagctcttctttcatttgtttgatagaatggcaaatgtcatctaaattttcacaaaatccatgcttgagaaaaggcacagtaattttggatttatccagaattactgtatcagcttgagacatcacatttkgaggtgcagtaggtagaaaacgataaaagttattataattcttcaagatgtcagaattttctgaagggtgtataattatgtttgaagataaattgtctgttgaagttctcagagttaatgtgtcctcggaatgtatctgggatggaacatttacactttgagggagactgttcacactatcaccacttaatttttcttccactgaatgaagtgtcttggaatcctcaaaatgatgacttttctccataga

SEQ ID NO: 429 - DNA, 801 bp, Homo sapiens
  misc_feature (401)..(401): Y = C/T
caaatatccatattaaccactatttttcaaggaagtatggaaaagtacactctgtcactttgtcactcgatgtcattccaaagttattgcctactaagtaatgactgtcatgaaagcagcattgaaataatttgtttaaagggggcactcttttaaacgggaagaaaatttccgcttcctggtcttatcatggacaatttgggctagaggcaggaaggaagtgggatgacctcaggaggtcaccttttcttgattccagaaacatatgggctgataaacccggggtgacctcatgaaatgagttgcagcagaagtttatttttttcagaacaagtgatgtttgatggacctctgaatctctttagggagacacagatggctgggatccctcccctgtaccyttctcactgccaggagaactacgtgtgaaggtattcaaggcagggagtatacattgctgtttcctgttgggcaatgctccttgaccacattttgggaagagtggatgttatcattgagaaaacaatgtgtctggaattaatggggttcttataaagaaggttcccagaaaagaatgttcatccagcctcctcagaaacagaacattcaagaaaaggacaatcaggatgtcatcagggaaatgaaaataaaaaccacaatgagatatcaccttataccaggtagaatggctactataaaaaaatgaagtgtcatcaaggatatagagaaattggaacccttcttcactgctggagggaatggaaaatggtgtagccgttatgaaaaacagtacggaggttt

SEQ ID NO: 430 - DNA, 1315 bp, Homo sapiens
  misc_feature (876)..(876): S = C/G
aggtattcaaggcagggagtatacattgctgtttcctgttgggcaatgctccttgaccacattttgggaagagtggatgttatcattgagaaaacaatgtgtctggaattaatggggttcttataaagaaggttcccagaaaagaatgttcatccagcctcctcagaaacagaacattcaagaaaaggacaatcaggatgtcatcagggaaatgaaaataaaaaccacaatgagatatcaccttataccaggtagaatggctactataaaaaaatgaagtgtcatcaaggatatagagaaattggaacccttcttcactgctggagggaatggaaaatggtgtagccgttatgaaaaacagtacggaggtttctcaaaaattaaaaatagaactgctatatgatccagcaatctcacttctgtatatatacccaaaataattgaaatcagaatttcaagaaaatatttacactcccatgttcattgtggcactcttcacaatcactgtttccaaagttatggaaacaacccaaatttccattgaaaaataaatggacaaagaaaatgtgcatatacgtacaatgggatattattcagcctaaaaaaagggggaatcctgttatttatgacaacatgaataaacccggaggccattatgctatgtaaaatgagcaagtaacagaaagacaaatactgcctgatttcatttatatgaggttctaaaatagtcaaactcatagaagcagagaatagaacagtggttcctagggaaaaggaggaagggagaaatgaggaaatagggagttgtctaattggtataaaattatagtatgcaagatgaattagctctaaagatcagctgtatagcagagttcstataatgaacaatactgtattatgcacttaacattttgttaagagggtacctctcatgttaagtgttcttaccatatacatatacacaaggaagcttttggaggtgatggatatatttattaccttgattgtggtgatggtttgacaggtatgtgactatgtctaaactcatcaaattgtatacattaaatatatgcagttttataatatcaattatgtctgaatgaagctataaaaaagaaaagacaacaaaattcagttgtcaaaactggaaatatgaccacagtcagaagtgtttgttactgagtgtttcagagtgtgtttggtttgagcaggtctagggtgattgaacatccctgggtgtgtttccatgtctcatgtactagtgaaagtagatgtgtgcatttgtgcacatatccctatgtatccctatcagggc

SEQ ID NO: 431 - DNA, 601 bp, Homo sapiens
  misc_feature (301)..(301): R = A/G
ttaggacaatgagtttaacggtgatgtgtcccagacgggggtagggagagtgaggagatgcgattgtggctgccacaataacacttgtgcgagttaggtggggctgtacatatggttcttcaatcagcatttttcctctaaaaaccttaagcaatcctggctatgcagggagatgtctggcggttgcgtaactcacacccagcagccatagagactgtcccttgttgatccttcagggcggaataatgggcattgagatctactgggactgcaacctagaccgttggttccatcactgccrtcccaaatacagtttccgtcgccttgacgacaagaccaccaacgtgtccttgtaccctggctacaacttcaggtaactccaaggcccaggtcaaactcacccagtggctgaatcgcattcccaggaactggtgagactaattttggtttccaaggcaacaagatgaatgaaaaaagactttctctaagaactaggtgataactgaattttttccataattttttaaaattctcaaaagagatgcacactctttattttttacttatttttttttttttgaaatggagtctcactctgtca

SEQ ID NO: 432 - DNA, 601 bp, Homo sapiens
  misc_feature (301)..(301): W = A/T
cagtggatgggtaggcagggaataaacaataaagagagtgacattgttttagctttctgtgactccaaccaccggttggttggatggatggttaacattagctagaaatgtttaggatagtaattttaaaccttagtccacttaccagtagcctaagcaatataaatggctgcagatccttgtagaggtgttgccctgcaccttggctctgtctgaaggccagtgacgcagtgacagggaatgcagagacgtggaagggctgtttccagagacagagtagagtggtggatccagacaccawcagatgccagagaaacacttgggccttttcttggtaccagttaacaggtgccctgctgggaacataaacacaatcttctggacttccaaaccaaacataacagagatagggcggcagaggatgaacttggacagccccaagcaggcatgccctggcttccttagacttcctctgtgactgtcaaatggattaaaatatgtgatatgttctcttcctgcaggaagttcaacttgggaaatggaccagggtcccagtaaggagctgggcttctctgtggatgctgtatggcctgatccccca

SEQ ID NO: 433 - DNA, 601 bp, Homo sapiens
  misc_feature (301)..(301): Y = C/T
cattgcactcataaggtttctctcctgtgtgaattctctgatgggtaatgaggccatatttgtgtgaataggattttccgcactcggtacatacaaagggagtctttcctgtatgacatctctcatgttgtatgaggcatattttctggctgaaggctttaccacattcattgcattcatagggtttttctcctgtatgagttcgctgatgtataataagagtgcgctttgtggtgaagcctttaccacattcattgcatatgtaagatttctctcctgtatgagttcgctgatgtataaygagagtgcgtttgacagtgaagccttttccacattcgctgcatatgtaagatttttctcctgtgtgggagcgctgatgtacaatgagattgctcttcacggtaaagccttttccacattcactgcacatatagggtttctctccagtatgagttcgctgatgtacaacaagatagcgcttcatggtgaagccttttccacattcactgcatatatagggtttctcccctgtatgagttcgctgatgtacaatgagattgctcttcacagtgaaaccttttccacattctttgcacacata

SEQ ID NO: 434 - DNA, 704 bp, Homo sapiens
  misc_feature (504)..(504): S = C/G
tcagaaggaaccatagagttcaaatgacagggtgttgtccatcatgataaagactttgcctctatctctaaggcaacttattttcccaaagaactctctcatctgcagagagtttcccactttatttatttatttattttgagacggagttttgttctgtccacccaggctggagtgcagtggcatgatcttggctcactgcaacctccacctcccgggttcaagcaattctcttgcctcagcctcctgagtagctgggactacaggcacacgccaccatgcccggctaatttttttttgtatttttagtagagatagggtttcacaatgttggtcaggctggtctcgaactcctgacctcaagtgatctgcccaccttggcctccctaagtgttgagattacaggcgtgagctactgtgccccctcccacactctagttaatgagtggccttctctctgcccatctgagctcttacctgtgaccacgcctttgacacattccsgcgttcttggttttcttgctattttcacacagctcttcacagtccagggctctttcccttcctccaacatggagataatattcatatcaaaatgacacagtcctgtttataaaaagaaaggatcacaatgtgccggggcttttccagaatcccagccctatgtttacatgagaggacattatatgtggatctaagaaaac

SEQ ID NO: 435 - DNA, 601 bp, Homo sapiens
  misc_feature (301)..(301): R = A/G
ctcggcctcccaaagtgctgggattacaagtgtgagccaccacgcctggcttgcattttttttttctacttggcagcaaatgctgatggaattcagtgctgactacttaaagttgagtcacatcacacatttaatcagggtaataagaacatagcacacccactgtagagttacattaagacataaaaactctttgcttgaaatcaataaccgcgctgcacatgggacatctgtcaactgcttcagcacattgtttacaagtgaccagatgtccacaaggaataaaaacaacagcgatatrtctgtccatgcagattttacaaagcttctcctcttgcagacgccttagcggctcttcagggctgatttctctctgcaatgaagtctgattcaattcattttctgtagtgtctttctgagcgctcactagatctgcaacaagaacctcaagcgttttatagttgctcccagatgtttgaattctttcctccattattttcttaacgtccttgaaatcaaatcccattcgtatagcttcttgtagcataggattagggaagatggtatcactgattcttttagttagtgatggtgttttctt

SEQ ID NO: 436 - DNA, 601 bp, Homo sapiens
  misc_feature (301)..(301): Y = C/T
tgtgcccagccccaggctggtcttgacctagctcagaaaggagtgggattttgcctgggaggtgggggcttactcccaaagctgttgggctggcttactgcacctgcaggctgtcagaggtctccaggtagaggtagtagagggggaacaagcccttgtccacgccgtgcttgtcacgggtgaggtagcactgcatcatggtgcccgggagcgctggccgcagcacgtaggcttccatgtcctcctccagcccagggcagggggagcggattgccaaggaggcttcgtgcctcatatggtygctgtccgtgccaccctcgcctttcagggccttggacaactcttcgttgtgtgctgctgaggagttcgtccctgtagactcagaggcctctctcttcttttccaagtcttcttcctagcccaggcaccaaatttaaagtcgagggacaaccaccggcccagccttgcttactactgattgaccatcccagccctagggtcccgcccttgcccatccacattttctgcttattggtcaaaaatctcattcagtccacccagtcacgccctcctctgttgactggccagtctattcgctttc

SEQ ID NO: 437 - DNA, 601 bp, Homo sapiens
  misc_feature (301)..(301): R = A/G
agaaagatttacagaccaaagtctgctgttcttccctttttcagagcaggaaattgaagccccttcctccaggccactcccaactccaggctatcccaggctcccaaatgcccaggagttctggagccactaagcaggtgcccacccagcagattccatgggtgcccacaagcagacagacttttccttcaggggagatcatcgggggacatgaggccaagccccactcccgcccctacatggcttatcttatgatctgggatcagaagtctctgaagaggtgcggtggcttcctgatacragacgacttcgtgctgacagctgctcactgttggggaaggtgaggagcagaaaacagcccacaccctcctggaaacactccacagagacccctgccttcttcccaaggagctccctgggctcctgtgaacacacatgccaggaggtctccttagagggtgagaaaagggcagttaagtttgtggagagaggggaaggttggttccagaggtgctgctgaagtaagaaacagcagagtgaccaagcctgccatatttagaactgggggcatactttggcataagaatacaaactgaagcaa

SEQ ID NO: 438 - DNA, 787 bp, Homo sapiens
  misc_feature (587)..(587): Y = C/T
aacagccaaacaaaaatgcttatactggcatttgtcaaatctgtgatctgaatcccatggcacaaggtgccattctatttggcttgttgatgagtttttagttcaggctactatagaaatttatcatagattaggtggcttaaacagcagaaatgtttttctcacggtcccggaggctgcatgtccaagatcagggtgtcagtagggtccggttctggagagggctgtcttctaggtgtcagagacgacacagggttgctccctgtgttcttgagtggcagaaagagaaggagagaactctccagagtctcttttataagagccctaatcctattcatgagggctccacccttcttacctcatgacctcccaaaggtcccacctcctagtaccttcacaggggggttaggattttgacctatggattgggggaactccacaaacctttattccataatagtgggagtctatggcactgggctgatagcctcattttggtcttttactcaacagaacagagaggggtctcagggcccacagaagcccatgtggttaaacaaagtcaagacaagtttgaatgagcagaygtacacccgagtagaagggtttgtgcaggacatgcgtctcatctttcataaccacaaggaattttacagggtgagtggctctccctgcttccttttctctttcaattacatcactttaaagtcactttccctgtcatcttttcatgtcaggtaaatgttacaatcgcccttatcatatgacaagcccatacaagtacaaa

SEQ ID NO: 439 - DNA, 801 bp, Homo sapiens
  misc_feature (401)..(401): Y = C/T
gtaaccagtccctttcctcgagacataaattaaaatgtttctctcttgggtcttccagtttggccaccagctcagccaaaacccactcggtcacagctgggtctttagtgtcatacacaataaaagcatcatagcaacagtctggtgatattagacgctgatacccctttatcttggccttacagaaatggtaaatataccacacatcccagaaatagaggtgacttgctgtcatcatcaccatgagaaagagagatacagatatggaaagtgagaacagaatcaggttagtcagatctaactcacaggtgtacagatccagggagatcacactttggcccttgtgtgctcctggccccacacaagtcacatctgtggccaggtaaggaatagtcacctcygtatggttaacccaccagacaaaccacacagcatcacaggtgcacagaaaccgattatgatgcaaaagcaacatcttcagattgttgaggacattttctgggaagctggtcttttggatcatctggattttatttgagctgagatccagatatcgcaactggaaggcatcttgtagaaaatacttcgtcagactcctgatttgattattcttaagaatcagattcttgaggcttctggaacagttggataatctctcagggacagtggtcagttggttgtggctgaggtccaaagtttccaggttctttagacactggagtttcttccaactgaaagatttgagcccatttttggccaaagagagattctttagatttggaggcataccatcaaaaactc

SEQ ID NO: 440 - DNA, 711 bp, Homo sapiens
  misc_feature (155)..(155): M = A/C
tgcctcaaccccatgctctatgtcttcatgggccaggacttccgggagaggctgatccacgcccttcccgccagtctggagagggccctgaccgaggactcaacccaaaccagtgacacagctaccaattctactttaccttctgcagaggtggmgttacaggcaaagtgaggagggagctgggggacactttcgagctcccagctccagcttcgtctcaccttgagttaggctgagccacaggcatttcctgcttattttaggattacccactcatcagaaaaaaaaaaaaagcctttgtgtcccctgatttggggagaataaacagatatgagtttattattgacttcttttttgattttggacctcagcctcgggtggtcagggtgggaaatgataggaagaagctgtcatctgcatcctagtttgcctgaaatgaacccaaataatacccattattattagtcctgaattatgagtagtgaatgatacccatcattctggcatcatgatgagtagtgtccacttccattctgaaaagtgccctgctgtgaaaaataaattatatagtcatcctaggtaaatgaaggaggagggagaagtgtgaaagagtatggcttaaatcagacaagatatacaagaagatactttatatagggcaggagcggtggctcatgcctgtaatcccagcactttgggagcccaaggcag

SEQ ID NO: 441 - DNA, 835 bp, Homo sapiens
  misc_feature (184)..(184): Y = C/T
aagaccctgggtacagtcccttaaactctctggatctcattgcatctgtaaagtctgagagaatgacaaagtgtcctttctagtcctgaccctatgcctcatcctgtactttctccataggtgcccaacgctctgggagagccccaggtgccctcccagcaggccacctcctgctgtttctcayccttggtgtcctttctctgctccttttggtgactggagcctttggctttcacctttggagaagacaggtgagccagggacatggcaaccccgccccccagcagctcccgctcttccatcctcagagtgctgatggcaccccttcctcaggaaggtgaccaaatgggaccctgaacttgccctcagagccccccttcttcataagcctctcactccagggatggcttgtgcctgggtaggctggaaggggggttgggagaaagccaggaccagatggggagggcaggggcgctgagaaaaaatagagggactcagtgtccctcctcatccgcttcccttcatccttctcctccttccgccctccgtctctctctccatctcttctcacagtggcgaccaagacgattttctgccttagagcaagggattcaccctccgcagctcagagcaagatagaggagctggagcaagaaccggagccggagccgagcccggaaccggagcccgagcccgacccgagcccggaacagctttgacctggagctgaggcagccagcagatctcagcagcccagtccaaataaactccctgtcagcagcaagcctgagtctggctttttcttggccagtggagggttcccgtctctccccag

SEQ ID NO: 442 - DNA, 601 bp, Homo sapiens
  misc_feature (301)..(301): R = A/G
caggcatgctggtggtccaggccatctctgccagtctcttcacagcctcacccagctgccccagaccccgggcagcttctaccagctgcgtcagccccagcagcagggcttggcgctcctgccgctcctgttccacgacctgggtcagtctctgcagctgaccacccacatccctcacagcagccaccagctccaccagggcaggtggctcacaagccatgacccttacaggtggtgttggggccacacatggaccatgggggcctgggctctgaccaggagttggccctagggtgagggrgtcaaggggaggatgatccaaggggtgggctgtgggggaaaggagggggtcaggggacacagtaaggtcagaggctgagtgtggggtatgggtgggtggaggggttaggttggggctctggcttctgggtggcttgaagtcctcagtggacagtgggtccatgcttgtggctgtggaggacctggaggggctggactccaaggctggagagggctctaaggtgggtatctgggatgtggaggtgtgaggggcaggtgctgtgaaggtcaactgggggtgcagactgggcttgactgttgg

SEQ ID NO: 443 - DNA, 801 bp, Homo sapiens
  misc_feature (401)..(401): Y = C/T
aggattttataacctgacagcgtgctggaacttctctgctggactcctggactcccacaatggtattgtctcatctgtggatagttgtctaaattgatgcttctgtgtgggaagaaagctcctattctactattttgctgatgcctttctctcatattacttttgttaaataattaggagttggataggagaggaattgcatagctttggggaaaatggtgcctcatagcgtgatggtgaacatttgtgaacatttctcagaatattctgtaactactttgatttcttcttcttttttaaattttggtcagtttttatagccttttatgttgtggcaggaagaagcctgattttcctttaattttacaaaaatctctacatatacttacctcggttatcayatgaagtgtctagagaattgaagaaaaattataagattcttaatttctcataaacagactcctatattaatttcttagcaatacaataatttaccactttgtgttgaatatgcatgtcgggatcctaaaagagaagataaaaacataatgagattttacttcaacaagtgagtctatattattttttgttagatagaaatctgtttacctcttcctcttttagatctctgagaagaaaaatcttttaggaaagaaaaaaacatattaactttaccaacagttcatgaaaaaataagtttatcgggccgggcgtggtggctcacgcctatgttcccagcactttgggaggccgaggcgggtggatcacgaggtcaggagatcgagaccatcctggctaaca

SEQ ID NO: 444 - DNA, 801 bp, Homo sapiens
  misc_feature (401)..(401): R = A/G
ttggtccggccacttcactaaggccatcttcatgaatggatttaggctttttactgaaccatctgttccagtgcctgaactggaacagttctctgttgctgctctcagaccacaggaagcatctgaagggagcctcagaattatgcaggcctacccagtattaattaattctccccaactccagtttggcattcagtactgctcagaaatctctggtagatttctcccactcacttagaagcagttcagttcatgcaatggtgcactatgcaaggttctggaaacacaactgtaaacaagacagatttctttcctgacttgtgaaaattctataagtactatatttatttttctcatgagtataagtacttactttgttctgaactgtatctggagatatrcatttctgtggaagaattaggcaaaatgtttttattagttacttaggagaagtgttcttcctctgatcaaactcttctcactctaagctatgcttcttgcttaccaaggtggtcctcctgatataatgcattgttgttctcacccattttccacatctcccatcagccctgttttacctatcttttcacactacttatgctttgagggctcacaggcattgaggatgggaaacagggagggaatacagctgattagaaagttgtgggagagaaacagaaaaatccaggaaagagagaccttatggcatagaaataggtcttagcttttatgagctccatctctatttcatcgacaagtactactctgtatttgtctcttcttatcatctccccaaattaa

SEQ ID NO: 445 - DNA, 801 bp, Homo sapiens
  misc_feature (401)..(401): S = C/G
gaccacgggaacacgccaccacagctacttttttattttttttgtagagacaggctgaccagtttctttgtacttatttttatgtggctgatagaaaattgaaattctcacctgtggcttccactgtgtttctattggactaaagaacctgtcacattttgtcagctcccaaccaccccctaccactgtccttataaaagaaataaaaataaaacagcggctgcctcttacctgtggcactagtgacaatctccacagagctatttactccgtctttctccacccacacagaacacgtatacaatgacccgggtccaaggccatccacggtgactctggtgtctgttgtgtttcgagtctctgttctgccaccatctccagtgcactgaacgcagtaggtsgagttctgtgggtctgtgccatcggggacctcccagctcagggagatggagctggtggtctgagcctccactctcaggttcctcactgggttgtgagctgagaaattaggaagaaagatctaatatgagcaggactacagaacataacgggggcagccagtgagctttttgtttgtttgttttttcgagacagagtctctgtctgtcatccaggctggagtgcagtggcacgatctcggctcaccacagcctccgccgtccgggttcaagcgattctcctgcctcagcctcccgagtaggtgggactacaggtctgcaccaccacacccggcttatttttatattttttcaccatgctggccaggctggtctcgaactcctgacctcaggtgatcctccc

SEQ ID NO: 446 - DNA, 601 bp, Homo sapiens
  misc_feature (301)..(301): Y = C/T
acggtatgggcagaatttagggcccaatcctaggagttcagtaactgagagatttcagaacttgaattggaattttagagaatcccagaaattagaagtttcttccaaaacgccgtaggctgctaagagccagccatctgctagtgagggccctgttgccctgatcagggtgggcccttcagtggcagagttaggatcaggcccagtactcctggctgtcaaaatgtgagcaaatgttggtgccagctttgacaggtttattcaagcacttgtgtctgtctgtgctcctcctctcccagcygctccttccagggtctgaacgccaggtgcaggctctcctgagcaggtatggccctgggaagctgtaccaggtgacaagcaacatcagtgggactgggactctggacctgactctgcctcggggccaaatcgtggccatccttcaaaacaaggacaccaaaggcaacagcggccgctggctggtggacaccgggggtacgtgagcctttgggagcccttcttctccttcggggaaaaccaccccacagaagccggtgcagagacccgggcactcttgtgggtcaaagtctggctgggcatt

SEQ ID NO: 447 - DNA, 601 bp, Homo sapiens
  misc_feature (301)..(301): N = A/C/G/T
tagaaattggtggcttcatagtccaagggagcagctacagtgagcagccctgtctccagctctatgtcaaagcagccctcctcattgccatctgcaatcacatagaccagtttgccattaaaaccagcatcagggtcagtggctgctaggcgggccaagggggtgttgatagggacactctcaaggacatcaatggattgggggaagtggtcctcaaactgtggggtgtaatgattaatctgatatgtgcttaaagaagtgaattcctcatcactggactcctggttctgaagcccaatanagtggaggatagtctttgtgaattgtgtcaatacccctgttttatcacatgttacaggaacttcaaaatgagggtccttcaccacagtaatattcaaagttgtgggtgaggcatagtttttgccatctgaggctgtaatcttcagggaataactggtgggttgaccagcagtaagattgataaaagggcgtttgagggatatcactccggagaaatgatttagatcaaaatactctagttcattgcctgatacaatctcgtattttaggttctgaagctcatccacatctatggctgaca

SEQ ID NO: 448 - DNA, 601 bp, Homo sapiens
  misc_feature (301)..(301): R = A/G
ggggctggctctttattgtcaactctacgatcccagtataaaaggaaattatgaagatataagctgaaatatatccaagaaatcagatccaagaaaagacaaaaagtctttaaagctataacagcattaaaaaagttatcagatggggagatgaatatatagtggagctgcttaggtaccctcagatacttcatatatgtgacacctttccttaatgactacaataagactcctatagccactgtccttgctggttctcacttacctggacaatttttattctgaattttagcatctgttrtccatggttcttgtccatgtgccaacttggagagtacatctggtttgctagtttgataccctgttcatgaggaaagacaaacacaaacatcctgaattggagtccagtatgtcaagatggaaaaataatacattcgatgaagaaaacaatttcaaagtaagcattctgtcttagaagagattataccactttggggtcagagaggggactgaaaatgtaactcttccaaacaccacagtgactgtaaagctttgattaggtgagcataggacggtgtctgggcattgtaggcacctctag

SEQ ID NO: 449 - DNA, 501 bp, Homo sapiens
  misc_feature (251)..(251): R = A/G
accatgtcacattcattgtgcttgtaaggtttctctccactatgaattacaaggtgtgaattttgaccttttaattacaaggtgtgaattttgaccaacggtcttgccacactcattacacttataatgagtttctctccagtgtgaattctagtatgttttgccagatatgcattatatgcaaaaaccttgtcacaaaccttacctctgtatggtttctcttcaatgtgaattttcttatgtgttttaargtttgatttacaactgaaaacttttgtcacattcctcccatttgtaaggtttctctccagtatgaagtctatggtgatgtgcaaaggttgctttttgattaaaaaccttgccacattcattatgcttgtaaggtttctctccagtatgaattgccttatgacttacagggttgaattgtgatggaaggtcttgccacactcattacactattaaggcttctctccactatgaagcctatgatggtataca

SEQ ID NO: 450 - DNA, 667 bp, Homo sapiens
  misc_feature (565)..(565): R = A/G
ttcctatcagacattacaaattatccacagccttctttcttggctttgtggattagagggagcatccttgtttttgcgcacccaaacagccagaaagaactgtgacaagtattgtagacggaatattcaagcagatggatactgaccaatatttagagcttcccagattttagggctatctaaatttgaagaggatattcttgtgtgatgaattccctttctctggatgtatgaaagaaactcattttgtggagaagaaaaggtttgagtagataacaacctcaaagccttgagattttatgattctaagggtttctggttgtcacaatcatgggcccgacagggttgcccaatttggcaaataataatatatgatacccagttacgatagaatttcagataagtagtgattttgttttactatgagcgtgtcttatgcaatatttggggcatatttatactaaaaagttacattaattacctgaaattcaaatgtaattggtgtcctgtgttttacgtagcaaccacactgcctgtcattgtgctttatgtcagatggtggaaraagcccacgtgacctccaacatctgccagcccagggagattctgacgctgacccccatcctggacattcgtttctacatgctgataatcctgcccttcctga

SEQ ID NO: 451 - DNA, 801 bp, Homo sapiens
  misc_feature (401)..(401): Y = C/T
ccagagcccagatgtccctagtcctcttcaaaagaccccaataaatctgccccaccactaactcctcatgagtctcaagtgttttcttctccattctccagatgccaaatctactctctccggattcccccaactctgaactttcccttccaccaggtctgacctggaaaggtccaagaaggcagctgccggctgtggtcccagcgcccctcccaccaccatgtgggagctcagcacatctgcttcccccagtcccaggaggctgagcctgattgtcctgagaaatgggaaggatcagatatgactcctccttggcaactgccctttcctgccaggcccacacataccctcttctggctgttaggggagcttgggtccctgaacactgtcattcacccaayaaattactatttgaccccagagtgggtggaagggtgagccatgtgttttttttattttaatttttaaaaaatttaaaaaattccctattcaaaggtcaaaaagccacataagttttgatgatgatcaatttgaacggaggctcgagatggactgagaggactgagacacagaagtggggggaccatggtttttactggctggaccacagggggaccctgtccacccgcctgggttgaggaaggtgtctggggtgctcaggtgggtttgttctcagcaatgcaggcatagtcagctcttggatcctccttggtgcctctcttgtctctgcccctgaggtcaggtccctcactgctgggcactggcagcctctgcagagatgcatagtggagttcctgctct

SEQ ID NO: 452 - DNA, 511 bp, Homo sapiens
  misc_feature (256)..(256): N = A/C/G/T
gatgttcagcagcaggctcatttgaagtcggactcaaccctgatggaaactcattctaccttcagaatgtgggggctggggggaaaaatgcaggtcttgggggacggtaaggaagaaaacctctcggtaaatagacatttctcattgcaaatggagcacgtggtggacctgggacatcccttggagaaaaataatctggagaagctccaaacacggttcctggaggaggtggggggaaaggaggtcctcttcttangaacgggccccttgtatctactggaaacaataaacctctgattggagcaagaggtggaggaacaaagccagggccagttgcttcattttcagcggggagagatgaatcaggcacctttaaattaccaagattatctttggtatcatttctactggattccatttctgaaggcattgacccatccattttatccaaagaaggcatattaaaacttctgagttctgctggtccagagagtctagcacaattagaata

SEQ ID NO: 453 - DNA, 31 bp, artificial sequence
  Forward primer
aagcggccgcaatgggatccgaaatcggtac

SEQ ID NO: 454 - DNA, 30 bp, artificial sequence
  Reverse primer
aagcggccgcgccggccagcccggggagcc

SEQ ID NO: 455 - protein, 384 aa, Homo sapiens
MARALVQLWAICMLRVALATVYFQEEFLDGEHWRNRWLQSTNDSRFGHFRLSSGKFYGHKEKDKGLQTTQNGRFYAISARFKPFSNKGKTLVIQYTVKHEQKMDCGGGYIKVFPADIDQKNLNGKSQYYIMFGPDICGFDIKKVHVILHFKNKYHENKKLIRCKVDGFTHLYTLILRPDLSYDVKIDGQSIESGSIEYDWNLTSLKKETSPAESKDWEQTKDNKAQDWEKHFLDASTSKQSDWNGDLDGDWPAPMLQKPPYQDGLKPEGIHKDVWLHRKMKNTDYLTQYDLSEFENIGAIGLELWQVRSGTIFDNFLITDDEEYADNFGKATWGETKGPEREMDAIQAKEEMKKAREEEEEELLSGKINRHEHYFNQFHRRNEL

SEQ ID NO: 456 - protein, 92 aa, Homo sapiens
MQVSTAALAVLLCTMALCNQFSASLAADTPTACCFSYTSRQIPQNFIADYFETSSQCSKPGVIFLTKRSRQVCADPSEEWVQKYVSDLELSA

SEQ ID NO: 457 - protein, 355 aa, Homo sapiens
METPNTTEDYDTTTEFDYGDATPCQKVNERAFGAQLLPPLYSLVFVIGLVGNILVVLVLVQYKRLKNMTSIYLLNLAISDLLFLFTLPFWIDYKLKDDWVFGDAMCKILSGFYYTGLYSEIFFIILLTIDRYLAIVHAVFALRARTVTFGVITSIIIWALAILASMPGLYFSKTQWEFTHHTCSLHFPHESLREWKLFQALKLNLFGLVLPLLVMIICYTGIIKILLRRPNEKKSKAVRLIFVIMIIFFLFWTPYNLTILISVFQDFLFTHECEQSRHLDLAVQVTEVIAYTHCCVNPVIYAFVGERFRKYLRQLFHRRVAVHLVKWLPFLSVDRLERVSSTSPSTGEHELSAGF

SEQ ID NO: 458 - protein, 374 aa, Homo sapiens
MLSTSRSRFIRNTNESGEEVTTFFDYDYGAPCHKFDVKQIGAQLLPPLYSLVFIFGFVGNMLVVLILINCKKLKCLTDIYLLNLAISDLLFLITLPLWAHSAANEWVFGNAMCKLFTGLYHIGYFGGIFFIILLTIDRYLAIVHAVFALKARTVTFGVVTSVITWLVAVFASVPGIIFTKCQKEDSVYVCGPYFPRGWNNFHTIMRNILGLVLPLLIMVICYSGILKTLLRCRNEKKRHRAVRVIFTIMIVYFLFWTPYNIVILLNTFQEFFGLSNCESTSQLDQATQVTETLGMTHCCINPIIYAFVGEKFRSLFHIALGCRIAPLQKPVCGGPGVRPGKNVKVTTQGLLDGRGKGKSIGRAPEASLQDKEGA

SEQ ID NO: 459 - protein, 99 aa, Homo sapiens
MTSKLAVALLAAFLISAALCEGAVLPRSAKELRCQCIKTYSKPFHPKFIKELRVIESGPHCANTEIIVKLSDGRELCLDPKENWVQRVVEKFLKRAENS

SEQ ID NO: 460 - protein, 350 aa, Homo sapiens
MSNITDPQMWDFDDLNFTGMPPADEDYSPCMLETETLNKYVVIIAYALVFLLSLLGNSLVMLVILYSRVGRSVTDVYLLNLALADLLFALTLPIWAASKVNGWIFGTFLCKVVSLLKEVNFYSGILLLACISVDRYLAIVHATRTLTQKRHLVKFVCLGCWGLSMNLSLPFFLFRQAYHPNNSSPVCYEVLGNDTAKWRMVLRILPHTFGFIVPLFVMLFCYGFTLRTLFKAHMGQKHRAMRVIFAVVLIFLLCWLPYNLVLLADTLMRTQVIQESCERRNNIGRALDATEILGFLHSCLNPIIYAFIGQNFRHGFLKILAMHGLVSKEFLARHRVTSYTSSSVNVSSNL

SEQ ID NO: 461 - protein, 360 aa, Homo sapiens
MEDFNMESDSFEDFWKGEDLSNYSYSSTLPPFLLDAAPCEPESLEINKYFVVIIYALVFLLSLLGNSLVMLVILYSRVGRSVTDVYLLNLALADLLFALTLPIWAASKVNGWIFGTFLCKVVSLLKEVNFYSGILLLACISVDRYLAIVHATRTLTQKRYLVKFICLSIWGLSLLLALPVLLFRRTVYSSNVSPACYEDMGNNTANWRMLLRILPQSFGFIVPLLIMLFCYGFTLRTLFKAHMGQKHRAMRVIFAVVLIFLLCWLPYNLVLLADTLMRTQVIQETCERRNHIDRALDATEILGILHSCLNPLIYAFIGQKFRHGLLKILAIHGLISKDSLPKDSRPSFVGSSSGHTSTTL

SEQ ID NO: 462 - protein, 468 aa, Homo sapiens
MAPPPARVHLGAFLAVTPNPGSAASGTEAAAATPSKVWGSSAGRIEPRGGGRGALPTSMGQHGPSARARAGRAPGPRPAREASPRLRVHKTFKFVVVGVLLQVVPSSAATIKLHDQSIGTQQWEHSPLGELCPPGSHRSEHPGACNRCTEGVGYTNASNNLFACLPCTACKSDEEERSPCTTTRNTACQCKPGTFRNDNSAEMCRKCSRGCPRGMVKVKDCTPWSDIECVHKESGNGHNIWVILVVTLVVPLLLVAVLIVCCCIGSGCGGDPKCMDRVCFWRLGLLRGPGAEDNAHNEILSNADSLSTFVSEQQMESQEPADLTGVTVQSPGEAQCLLGPAEAEGSQRRRLLVPANGADPTETLMLFFDKFANIVPFDSWDQLMRQLDLTKNEIDVVRAGTAGPGDALYAMLMKWVNKTGRNASIHTLLDALERMEERHAKEKIQDLLVDSGKFIYLEDGTGSAVSLE

SEQ ID NO: 463 - protein, 440 aa, Homo sapiens [sequence omitted]

SEQ ID NO: 464 - protein, 259 aa, Homo sapiens
MARIPKTLKFVVVIVAVLLPVLAYSATTARQEEVPQQTVAPQQQRHSFKGEECPAGSHRSEHTGACNPCTEGVDYTNASNNEPSCFPCTVCKSDQKHKSSCTMTRDTVCQCKEGTFRNENSPEMCRKCSRCPSGEVQVSNCTSWDDIQCVEEFGANATVETPAAEETMNTSPGTPAPAAEETMNTSPGTPAPAAEETMTTSPGTPAPAAEETMTTSPGTPAPAAEETMITSPGTPASSHYLSCTIVGIIVLIVLLIVFV

SEQ ID NO: 465 - protein, 386 aa, Homo sapiens
MGLWGQSVPTASSARAGRYPGARTASGTRPWLLDPKILKFVVFIVAVLLPVRVDSATIPRQDEVPQQTVAPQQQRRSLKEEECPAGSHRSEYTGACNPCTEGVDYTIASNNLPSCLLCTVCKSGQTNKSSCTTTRDTVCQCEKGSFQDKNSPEMCRTCRTGCPRGMVKVSNCTPRSDIKCKNESAASSTGKTPAAEETVTTILGMLASPYHYLIIIVVLVIILAVVVVGFSCRKKFISYLKGICSGGGGGPERVHRVLFRRRSCPSRVPGAEDNARNETLSNRYLQPTQVSEQEIQGQELAELTGVTVESPEEPQRLLEQAEAEGCQRRRLLVPVNDADSADISTLLDASATLEEGHAKETIQDQLVGSEKLFYEEDEAGSATSCL

SEQ ID NO: 466 - protein, 1153 aa, Homo sapiens
MACPWKFLFKTKFHQYAMNGEKDINNNVEKAPCATSSPVTQDDLQYHNLSKQQNESPQPLVETGKKSPESLVKLDATPLSSPRHVRIKNWGSGMTFQDTLHHKAKGILTCRSKSCLGSIMTPKSLTRGPRDKPTPPDELLPQAIEFVNQYYGSFKEAKIEEHLARVEAVTKEIETTGTYQLTGDELIFATKQAWRNAPRCIGRIQWSNLQVFDARSCSTAREMFEHICRHVRYSTNNGNIRSAITVFPQRSDGKHDFRVWNAQLIRYAGYQMPDGSIRGDPANVEFTQLCIDLGWKPKYGRFDVVPLVLQANGRDPELFEIPPDLVLEVAMEHPKYEWFRELELKWYALPAVANMLLEVGGLEFPGCPFNGWYMGTEIGVRDFCDVQRYNILEEVGRRMGLETHKLASLWKDQAVVEINIAVLHSFQKQNVTIMDHHSAAESFMKYMQNEYRSRGGCPADWIWLVPPMSGSITPVFHQEMLNYVLSPFYYYQVEAWKTHVWQDEKRRPKRREIPLKVLVKAVLFACMLMRKTMASRVRVTILFATETGKSEALAWDLGALFSCAFNPKVVCMDKYRLSCLEEERLLLVVTSTFGNGDCPGNGEKLKKSLFMLKELNNKFRYAVFGLGSSMYPRFCAFAHDIDQKLSHLGASQLTPMGEGDELSGQEDAFRSWAVQTFKAACETFDVRGKQHIQIPKLYTSNVTWDPHHYRLVQDSQPLDLSKALSSMHAKNVFTMRLKSRQNLQSPTSSRATILVELSCEDGQGLNYLPGEHLGVCPGNQPALVQGILERVVDGPTPHQTVRLEALDESGSYWVSDKRLPPCSLSQALTYFLDITTPPTQLLLQKLAQVATEEPERQRLEALCQPSEYSKWKFTNSPTFLEVLEEFPSLRVSAGFLLSQLPILKPRFYSISSSRDHTPTEIHLTVAVVTYHTRDGQGPLHHGVCSTWLNSLKPQDPVPCFVRNASGFHLPEDPSHPCILIGPGTGIAPFRSFWQQRLHDSQHKGVRGGRMTLVFGCRRPDEDHIYQEEMLEMAQKGVLHAVHTAYSRLPGKPKVYVQDILRQQLASEVLRVLHKEPGHLYVCGDVRMARDVAHTLKQLVAAKLKLNEEQVEDYFFQLKSQKRYHEDIFGAVFPYEAKKDRVAVQPSSLEMSAL

SEQ ID NO: 467 - protein, 222 aa, Homo sapiens [sequence omitted]

SEQ ID NO: 468 - protein, 1115 aa, Homo sapiens
MERAISPGLLVRALLLLLLLGLAARTVAAGRARGLPAPTAEAAFGLGAAAAPTSATRVPAAGAVAAAEVTVEDAEALPAAAGEQEPRGPEPDDETELRPRGRSLVIISTLDGRIAALDPENHGKKQWDLDVGSGSLVSSSLSKPEVFGNKMIIPSLDGALFQWDRDRESMETVPFTVESLLESSYKFGDDVVLVGGKSLTTYGLSAYSGKVRYICSALGCRQWDSDEMEQEEDILLLQRTQKTVRAVGPRSGNEKWNFSVGHFELRYIPDMETRAGFIESTFKPNENTEESKIISDVEEQEAAIMDIVIKVSVADWKVMAFSKKGGHLEWEYQFCTPIASAWLLKDGKVIPISLFDDTSYTSNDDVLEDEEDIVEAARGATENSVYLGMYRGQLYLQSSVRISEKFPSSPKALESVTNENAIIPLPTIKWKPLIHSPSRTPVLVGSDEFDKCLSNDKFSHEEYSNGALSILQYPYDNGYYLPYYKRERNKRSTQITVRFLDNPHYNKNIRKKDPVLLLHWWKEIVATILFCIIATTFIVRRLFHPHPHRQRKESETQCQTENKYDSVSGEANDSSWNDIKNSGYISRYLTDFEPIQCLGRGGFGVVFEAKNKVDDCNYAIKRIRLPNRELAREKVMREVKALAKLEHPGIVRYFNAWLEAPPEKWQEKMDEIWLKDESTDWPLSSPSPMDAPSVKIRRMDPFSTKEHIEIIAPSPQRSRSFSVGISCDQTSSSESQFSPLEFSGMDHEDISESVDAAYNLQDSCLTDCDVEDGTMDGNDEGHSFELCPSEASPYVRSRERTSSSIVFEDSGCDNASSKEEPKTNRLHIGNHCANKLTAFKPTSSKSSSEATLSISPPRPTTLSLDLTKNTTEKLQPSSPKVYLYIQMQLCRKENLKDWMNGRCTIEERERSVCLHIFLQIAEAVEFLHSKGLMHRDLKPSNIFFTMDDVVKVGDFGLVTAMDQDEEEQTVLTPMPAYARHTGQVGTKLYMSPEQIHGNSYSHKVDIFSLGLILFELLYPFSTQMERVRTLTDVRNLKFPPLFTQKYPCEYVMVQDMLSPSPMERPEAINIIENAVFEDLDFPGKTVLRQRSRSLSSSGTKHSRQSNNSHSPLPSN

SEQ ID NO: 469 - protein, 551 aa, Homo sapiens
MAGDLSAGFFMEELNTYRQKQGVVLKYQELPNSGPPHDRRFTFQVIIDGREFPEGEGRSKKEAKNAAAKLAVEILNKEKKAVSPLLLTTTNSSEGLSMGNYIGLINRIAQKKRLTVNYEQCASGVHGPEGFHYKCKMGQKEYSIGTGSTKQEAKQLAAKLAYLQILSEETSVKSDYLSSGSFATTCESQSNSLVTSTLASESSSEGDFSADTSEINSNSDSLNSSSLLMNGLRNNQRKAKRSLAPRFDLPDMKETKYTVDKRFGMDFKEIELIGSGGFGQVFKAKHRIDGKTYVIKRVKYNNEKAEREVKALAKLDHVNIVHYNGCWDGFDYDPETSDDSLESSDYDPENSKNSSRSKTKCLFIQMEFCDKGTLEQWIEKRRGEKLDKVLALELFEQITKGVDYIHSKKLIHRDLKPSNIFLVDTKQVKIGDFGLVTSLKNDGKRTRSKGTLRYMSPEQISSQDYGKEVDLYALGLILAELLHVCDTAFETSKFFTDLRDGIISDIFDKKEKTLLQKLLSKKPEDRPNTSEILRTLTVWKKSPEKNERHTC

SEQ ID NO: 470 - protein, 330 aa, Homo sapiens
MSDSEKLNLDSIIGRLLEVQGSRPGKNVQLTENEIRGLCLKSREIFLSQPILLELEAPLKICGDIHGQYYDLLRLFEYGGFPPESNYLFLGDYVDRGKQSLETICLLLAYKIKYPENFFLLRGNHECASINRIYGFYDECKRRYNIKLWKTFTDCFNCLPIAAIVDEKIFCCHGGLSPDLQSMEQIRRIMRPTDVPDQGLLCDLLWSDPDKDVQGWGENDRGVSFTFGAEVVAKFLHKHDLDLICRAHQVVEDGYEFFAKRQLVTLFSAPNYCGEFDNAGAMMSVDETLMCSFQILKPADKNKGKYGQFSGLNPGGRPITPPRNSAKAKK

SEQ ID NO: 471 - protein, 327 aa, Homo sapiens
MADGELNVDSLITRLLEVRGCRPGKIVQMTEAEVRGLCIKSREIFLSQPILLELEAPLKICGDIHGQYTDLLRLFEYGGFPPEANYLFLGDYVDRGKQSLETICLLLAYKIKYPENFFLLRGNHECASINRIYGFYDECKRRFNIKLWKTFTDCFNCLPIAAIVDEKIFCCHGGLSPDLQSMEQIRRIMRPTDVPDTGLLCDLLWSDPDKDVQGWGENDRGVSFTFGADVVSKFLNRHDLDLICRAHQVVEDGYEFFAKRQLVTLFSAPNYCGEFDNAGGMMSVDETLMCSFQILKPSEKKAKYQYGGLNSGRPVTPPRTANPPKKR

SEQ ID NO: 472 - protein, 323 aa, Homo sapiens
MADLDKLNIDSIIQRLLEVRGSKPGKNVQLQENEIRGLCLKSREIFLSQPILLELEAPLKICGDIHGQYYDLLRLFEYGGFPPESNYLFLGDYVDRGKQSLETICLLLAYKIKYPENFFLLRGNHECASINRIYGFYDECKRRYNIKLWKTFTDCFNCLPIAAIVDEKIFCCHGGLSPDLQSMEQIRRIMRPTDVPDQGLLCDLLWSDPDKDVLGWGENDRGVSFTFGAEVVAKFLHKHDLDLICRAHQVVEDGYEFFAKRQLVTLFSAPNYCGEFDNAGAMMSVDETLMCSFQILKPAEKKKPNATRPVTPPRGMITKQAKK

SEQ ID NO: 473 - protein, 674 aa, Homo sapiens
MAPGQAPHQATPWRDAHPFFLLSPVMGLLSRAWSRLRGLGPLEPWLVEAVKGAALVEAGLEGEARTPLAIPHTPWGRRPEEEAEDSGGPGEDRETLGLKTSSSLPEAWGLLDDDDGMYGEREATSVPRGQGSQFADGQRAPLSPSLLIRTLQGSDKNPGEEKAEEEGVAEEEGVNKFSYPPSHRECCPAVEEEDDEEAVKKEAHRTSTSALSPGSKPSTWVSCPGEEENQATEDKRTERSKGARKTSVSPRSSGSDPRSWEYRSGEASEEKEEKAHKETGKGEAAPGPQSSAPAQRPQLKSWWCQPSDEEEGEVKALGAAEKDGEAECPPCIPPPSAFLKAWVYWPGEDTEEEEDEEEDEDSDSGSDEEEGEAEASSSTPATGVFLKSWVYQPGEDTEEEEDEDSDTGSAEDEREAETSASTPPASAFLKAWVYRPGEDTEEEEDEDVDSEDKEDDSEAALGEAESDPHPSHPDQRAHFRGWGYRPGKETEEEEAAEDWGEAEPCPFRVAIYVPGEKPPPPWAPPRLPLRLQRRLKRPETPTHDPDPETPLKARKVRFSEKVTVHFLAVWAGPAQAARQGPWEQLARDRSRFARRITQAQEELSPCLTPAARARAWARLRNPPLAPIPALTQTLPSSSVPSSPVQTTPLSQAVATPSRSSAAAAAALDLSGRRG

SEQ ID NO: 474 - protein, 585 aa, Homo sapiens
MAPSTPLLTVRGSEGLYMVNGPPHFTESTVFPRESGKNCKVCIFSKDGTLFAWGNGEKVNIISVTNKGLLHSFDLLKAVCLEFSPKNTVLATWQPYTTSKDGTAGIPNLQLYDVKTGTCLKSFIQKKMQNWCPSWSEDETLCARNVNNEVHFFENNNFNTIANKLHLQKINDFVLSPGPQPYKVAVYVPGSKGAPSFVRLYQYPNFAGPHAALANKSFFKADKVTMLWNKKATAVLVIASTDVDKTGASYYGEQTLHYIATNGESAVVQLPKNGPIYDVVWNSSSTEFCAVYGFMPAKATIFNLKCDPVFDFGTGPRNAAYYSPHGHILVLAGFGNLRGQMEVWDVKNYKLISKPVASDSTYFAWCPDGEHILTATCAPRLRVNNGYKIWHYTGSILHKYDVPSNAELWQVSWQPFLDGIFPAKTITYQAVPSEVPNEEPKVATAYRPPALRNKPITNSKLHEEEPPQNMKPQSGNDKPLSKTALKNQRKHEAKKAAKQEARSDKSPDLAPTPAPQSTPRNTVSQSISGDPEIDKKIKNLKKKLKAIEQLKEQAATGKQLEKNQLEKIQKETALLQELEDLELGI

SEQ ID NO: 475 - protein, 1001 aa, Homo sapiens
MEAAHAKTTEECLAYFGVSETTGLTPDQVKRNLEKYGLNELPAEEGKTLWELVIEQFEDLLVRILLLAACISFVLAWFEEGEETITAFVEPFVILLILIANAIVGVWQERNAENAIEALKEYEPEMGKVYRADRKSVQRIKARDIVPGDIVEVAVGDKVPADIRILAIKSTTLRVDQSILTGESVSVIKHTEPVPDPRAVNQDKKNMLFSGTNIAAGKALGIVATTGVGTEIGKIRDQMAATEQDKTPLQQKLDEFGEQLSKVISLICVAVWLINIGHFNDPVHGGSWFRGAIYYFKIAVALAVAAIPEGLPAVITTCLALGTRRMAKKNAIVRSLPSVETLGCTSVICSDKTGTLTTNQMSVCKMFIIDKVDGDICLLNEFSITGSTYAPEGEVLKNDKPVRPGQYDGLVELATICALCNDSSLDFNEAKGVYEKVGEATETALTTLVEKMNVFNTDVRSLSKVERANACNSVIRQLMKKEFTLEFSRDRKSMSVYCSPAKSSRAAVGNKMFVKGAPEGVIDRCNYVRVGTTRVPLTGPVKEKIMAVIKEWGTGRDTLRCLALATRDTPPKREEMVLDDSARFLEYETDLTFVGVVGMLDPPRKEVTGSIQLCRDAGIRVIMITGDNKGTAIAICRRIGIFGENEEVADRAYTGREFDDLPLAEQREACRRACCFARVEPSHKSKIVEYLQSYDEITAMTGDGVNDAPALKKAEIGIAMGSGTAVAKTASEMVLADDNFSTIVAAVEEGRAIYNNMKQFIRYLISSNVGEVVCIFLTAALGLPEALIPVQLLWVNLVTDGLPATALGFNPPDLDIMDRPPRSPKEPLISGWLFFRYMAIGGYVGAATVGAAAWWFLYAEDGPHVNYSQLTHFMQCTEDNTHFEGIDCEVFEAPEPMTMALSVLVTIEMCNALNSLSENQSLLRMPPWVNIWLLGSICLSMSLHFLILYVDPLPMIFKLRALDLTQWLMVLKISLPVIGLDEILKFVARNYLEDPEDERRK

SEQ ID NO: 476 - protein, 1042 aa, Homo sapiens
MENAHTKTVEEVLGHFGVNESTGLSLEQVKKLKERWGSNELPAEEGKTLLELVIEQFEDLLVRILLLAACISFVLAWFEEGEETITAFVEPFVILLILVANAIVGVWQERNAENAIEALKEYEPEMGKVYRQDRKSVQRIKAKDIVPGDIVEIAVGDKVPADIRLTSIKSTTLRVDQSILTGESVSVIKHTDPVPDPRAVNQDKKNMLFSGTNIAAGKAMGVVVATGVNTEIGKIRDEMVATEQERTPLQQKLDEFGEQLSKVISLICIAVWIINIGHFNDPVHGGSWIRGAIYYFKIAVALAVAAIPEGLPAVITTCLALGTRRMAKKNAIVRSLPSVETLGCTSVICSDKTGTLTTNQMSVCRMFILDRVEGDTCSLNEFTITGSTYAPIGEVHKDDKPVNCHQYDGLVELATICALCNDSALDYNEAKGVYEKVGEATETALTCLVEKMNVFDTELKGLSKIERANACNSVIKQLMKKEFTLEFSRDRKSMSVYCTPNKPSRTSMSKMFVKGAPEGVIDRCTHIRVGSTKVPMTSGVKQKIMSVIREWGSGSDTLRCLALATHDNPLRREEMHLEDSANFIKYETNLTFVGCVGMLDPPRIEVASSVKLCRQAGIRVIMITGDNKGTAVAICRRIGIFGQDEDVTSKAFTGREFDELNPSAQRDACLNARCFARVEPSHKSKIVEFLQSFDEITAMTGDGVNDAPALKKAEIGIAMGSGTAVAKTASEMVLADDNFSTIVAAVEEGRAIYNNMKQFIRYLISSNVGEVVCIFLTAALGFPEALIPVQLLWVNLVTDGLPATALGFNPPDLDIMNKPPRNPKEPLISGWLFFRYLAIGCYVGAATVGAAAWWFIAADGGPRVSFYQLSHFLQCKEDNPDFEGVDCAIFESPYPMTMALSVLVTIEMCNALNSLSENQSLLRMPPWENIWLVGSICLSMSLHFLILYVEPLPLIFQITPLNVTQWLMVLKISLPVILMDETLKFVARNYLEPGKECVQPATKSCSFSACTDGISWPFVLLIMPLVIWVYSTDTNFSDMFWS

SEQ ID NO: 477 - protein, 1043 aa, Homo sapiens
MEAAHLLPAADVLRHFSVTAEGGLSPAQVTGARERYGPNELPSEEGKSLWELVLEQFEDLLVRILLLAALVSFVLAWFEEGEETTTAFVEPLVIMLILVANAIVGVWQERNAESAIEALKEYEPEMGKVIRSDRKGVQRIRARDIVPGDIVEVAVGDKVPADLRLIEIKSTTLRVDQSILTGESVSVTKHTEAIPDPRAVNQDKKNMLFSGTNITSGKAVGVAVATGLHTELGKIRSQMAAVEPERTPLQRKLDEFGRQLSHAISVICVAVWVINIGHFADPAHGGSWLRGAVYYFKIAVALAVAAIPEGLPAVITTCLALGTRRMARKNAIVRSLPSVETLGCTSVICSDKTGTLTTNQMSVCRMFVVAEADAGSCLLHEFTISGTTYTPEGEVRQGDQPVRCGQFDGLVELATICALCNDSALDYNEAKGVYEKVGEATETALTCLVEKMNVFDTDLQALSRVERAGACNTVIKQLMRKEFTLEFSRDRKSMSVYCTPTRPHPTGQGSKMFVKGAPESVIERCSSVRVGSRTAPLTPTSREQILAKIRDWGSGSDTLRCLALATRDAPPRKEDMELDDCSKFVQYETDLTFVGCVGMLDPPRPEVAACITRCYQAGIRVVMITGDNKGTAVAICRRLGIFGDTEDVAGKAYTGREFDDLSPEQQRQACRTARCFARVEPAHKSRIVENLQSFNEITAMTGDGVNDAPALKKAEIGIAMGSGTAVAKSAAEMVLSDDNFASIVAAVEEGRAIYSNMKQFIRYLISSNVGEVVCIFLTAILGLPEALIPVQLLWVNLVTDGLPATALGFNPPDLDIMEKLPRSPREALISGWLFFRYLAIGVYVGLATVAAATWWFVYDAEGPHINFYQLRNFLKCSEDNPLFAGIDCEVFESRFPTTMALSVLVTIEMCNALNSVSENQSLLRMPPWMNPWLLVAVAMSMALHFLILLVPPLPLIFQVTPLSGRQWVVVLQISLPVILLDEALKYLSRNHMHACLYPGLLRTVSQAWSRQPLTTSWTPDHTGRNEPEVSAGNRVESPVCTSD

SEQ ID NO: 478 - protein, 427 aa, Homo sapiens
MSRSKRDNNFYSVEIGDSTFTVLKRYQNLKPIGSGAQGIVCAAYDAILERNVAIKKLSRPFQNQTHAKRAYRELVLMKCVNHKNIIGLLNVFTPQKSLEEFQDVYIVMELMDANLCQVIQMELDHERMSYLLYQMLCGIKHLHSAGIIHRDLKPSNIVVKSDCTLKILDFGLARTAGTSFMMTPYVVTRYYRAPEVILGMGYKENVDLWSVGCIMGEMVCHKILFPGRDYIDQWNKVIEQLGTPCPEFMKKLQPTVRTYVENRPKYAGYSFEKLFPDVLFPADSEHNKLKASQARDLLSKMLVIDASKRISVDEALQHPYINVWYDPSEAEAPPPKIPDKQLDEREHTIEEWKELIYKEVMDLEERTKNGVIRGQPSPLGAAVINGSQHPSSSSSVNDVSSMSTDPTLASDTDSSLEAAAGPLGCCR

SEQ ID NO: 479 - protein, 424 aa, Homo sapiens
MSDSKCDSQFYSVQVADSTFTVLKRYQQLKPIGSGAQGIVCAAFDTVLGINVAVKKLSRPFQNQTHAKRAYRELVLLKCVNHKNIISLLNVFTPQKTLEEFQDVYLVMELMDANLCQVIHMELDHERMSYLLYQMLCGIKHLHSAGIIHRDLKPSNIVVKSDCTLKILDFGLARTACTNFMMTPYVVTRYYRAPEVILGMGYKENVDIWSVGCIMGELVKGCVIFQGTDHIDQWNKVIEQLGTPSAEFMKKLQPTVRNYVENRPKYPGIKFEELFPDWIFPSESERDKIKTSQARDLLSKMLVIDPDKRISVDEALRHPYITVWYDPAEAEAPPPQIYDAQLEEREHAIEEWKELIYKEVMDWEERSKNGVVKDQPSDAAVSSNATPSQSSSINDISSMSTEQTLASDTDSSLDASTGPLEGCR

SEQ ID NO: 480 - protein, 745 aa, Homo sapiens
MERPPGLRPGAGGPWEMRERLGTGGFGNVCLYQHRELDLKIAIKSCRLELSTKNRERWCHEIQIMKKLNHANVVKACDVPEELNILIHDVPLLAMEYCSGGDLRKLLNKPENCCGLKESQILSLLSDIGSGIRYLHENKIIHRDLKPENIVLQDVGGKIIHKIIDLGYAKDVDQGSLCTSFVGTLQYLAPELFENKPYTATVDYWSFGTMVFECIAGYRPFLHHLQPFTWHEKIKKKDPKCIFACEEMSGEVRFSSHLPQPNSLCSLIVEPMENWLQLMLNWDPQQRGGPVDLTLKQPRCFVLMDHILNLKIVHILNMTSAKIISFLLPPDESLHSLQSRIERETGINTGSQELLSETGISLDPRKPASQCVLDGVRGCDSYMVYLFDKSKTVYEGPFASRSLSDCVNYIVQDSKIQLPIIQLRKVWAEAVHYVSGLKEDYSRLFQGQRAAMLSLLRYNANLTKMKNTLISASQQLKAKLEFFHKSIQLDLERYSEQMTYGISSEKMLKAWKEMEEKAIHYAEVGVIGYLEDQIMSLHAEIMELQKSPYGRRQGDLMESLEQRAIDLYKQLKHRPSDHSYSDSTEMVKIIVHTVQSQDRVLKELFGHLSKLLGCKQKIIDLLPKVEVALSNIKEADNTVMFMQGKRQKEIWHLLKIACTQSSARSLVGSSLEGAVTPQTSAWLPPTSAEHDHSLSCVVTPQDGETSAQMIEENLNCLGHLSTIIHEANEEQGNSMMNLDWSWLTE

SEQ ID NO: 481 - protein, 756 aa, Homo sapiens
MSWSPSLTTQTCGAWEMKERLGTGGFGNVIRWHNQETGEQIAIKQCRQELSPRNRERWCLEIQIMRRLTHPNVVAARDVPEGMQNLAPNDLPLLAMEYCQGGDLRKYLNQFENCCGLREGAILTLLSDIASALRYLHENRIIHRDLKPENIVLQQGEQRLIHKIIDLGYAKELDQGSLCTSFVGTLQYLAPELLEQQKYTVTVDYWSFGTLAFECITGFRPFLPNWQPVQWHSKVRQKSEVDIVVSEDLNGTVKFSSSLPYPNNLNSVLAERLEKWLQLMLMWHPRQRGTDPTYGPNGCFKALDDILNLKLVHILNMVTGTIHTYPVTEDESLQSLKARIQQDTGIPEEDQELLQEAGLALIPDKPATQCISDGKLNEGHTLDMDLVFLFDNSKITYETQISPRPQPESVSCILQEPKRNLAFFQLRKVWGQVWHSIQTLKEDCNRLQQGQRAAMMNLLRNNSCLSKMKNSMASMSQQLKAKLDFFKTSIQIDLEKYSEQTEFGITSDKLLLAWREMEQAVELCGRENEVKLLVERMMALQTDIVDLQRSPMGRKQGGTLDDLEEQARELYRRLREKPRDQRTEGDSQEMVRLLLQAIQSFEKKVRVIYTQLSKTVVCKQKALELLPKVEEVVSLMNEDEKTVVRLQEKRQKELWNLLKIACSKVRGPVSGSPDSMNASRLSQPGQLMSQPSTASNSLPEPAKKSEELVAEAHNLCTLLENAIQDTVREQDQSFTALDWSWLQTEEEEHSCLEQAS

SEQ ID NO: 482 - protein, 419 aa, Homo sapiens
MNRHLWKSQLCEMVQPSGGPAADQDVLGEESPLGKPAMLHLPSEQGAPETLQRCLEENQELRDAIRQSNQILRERCEELLHFQASQREEKEFLMCKFQEARKLVERLGLEKLDLKRQKEQALREVEHLKRCQQQMAEDKASVKAQVTSLLGELQESQSRLEAATKECQALEGRARAASEQARQLESEREALQQQHSVQVDQLRMQGQSVEAALRMERQAASEEKRKLAQLQVAYHQLFQEYDNHIKSSVVGSERKRGMQLEDLKQQLQQAEEALVAKQEVIDKLKEEAEQHKIVMETVPVLKAQADIYKADFQAERQAREKLAEKKELLQEQLEQLQREYSKLKASCQESARIEDMRKRHVEVSQAPLPPAPAYLSSPLALPSQRRSPPEEPPDFCCPKCQYQAPDMDTLQIHVMECIE

SEQ ID NO: 483 - protein, 404 aa, Homo sapiens
MADKVLKEKRKLFIRSMGEGTINGLLDELLQTRVLNKEEMEKVKRENATVMDKTRALIDSVIPKGAQACQICITYICEEDSYLAGTLGLSADQTSGNYLNMQDSQGVLSSFPAPQAVQDNPAMPTSSGSEGNVKLCSLEEAQRIWKQKSAEIYPIMDKSSRTRLALIICNEEFDSIPRRTGAEVDITGMTMLLQNLGYSVDVKKNLTASDMTTELEAFAHRPEHKTSDSTFLVFMSHGIREGICGKKHSEQVPDILQLNAIFNMLNTKNCPSLKDKPKVIIIQACRGDSPGVVWFKDSVGVSGNLSLPTTEEFEDDAIKKAHIEKDFIAFCSSTPDNVSWRHPTMGSVFIGRLIEHMQEYACSCDVEEIFRKVRFSFEQPDGRAQMPTTERVTLTRCFYLFPGH

SEQ ID NO: 484 - protein, 479 aa, Homo sapiens
MDFSRNLYDIGEQLDSEDLASLKFLSLDYIPQRKQEPIKDALMLFQRLQEKRMLEESNLSFLKELLFRINRLDLLITYLNTRKEEMERELQTPGRAQISAYRVMLYQISEEVSRSELRSFKFLLQEEISKCKLDDDMNLLDIFIEMEKRVILGEGKLDILKRVCAQINKSLLKIINDYEEFSKERSSSLEGSPDEFSNGEELCGVMTISDSPREQDSESQTLDKVYQMKSKPRGYCLIINNHNFAKAREKVPKLHSIRDRNGTHLDAGALTTTFEELHFEIKPHDDCTVEQIYEILKIYQLMDHSNMDCFICCILSHGDKGIIYGTDGQEAPIYELTSQFTGLKCPSLAGKPKVFFIQACQGDNYQKGIPVETDSEEQPYLEMDLSSPQTRYIPDEADFLLGMATVNNCVSYRNPAEGTWYIQSLCQSLRERCPRGDDILTILTEVNYEVSNKDDKKNMGKQMPQPTFTLRKKLVFPSD

SEQ ID NO: 485 - protein, 208 aa, Homo sapiens
MDPFLVLLHSVSSSLSSSELTELKFLCLGRVGKRKLERVQSGLDLFSMLLEQNDLEPGHTELLRELLASLRRHDLLRRVDDFEAGAAAGAAPGEEDLCAAFNVICDNVGKDWRRLARQLKVSDTKIDSIEDRYPRNLTERVRESLRIWKNTEKENATVAHLVGALRSCQMNLVADLVQEVQQARDLQNRSGAMSPMSWNSDASTSEAS

SEQ ID NO: 486 - protein, 246 aa, Homo sapiens
MSLQWTAVATFLYAEVFVVLLLCIPFISPKRWQKIFKSRLVELLVSYGNTFFVVLIVILVLLVIDAVREIRKYDDVTEKVNLQNNPGAMEHFHMKLFRAQRNLYIAGFSLLLSFLLRRLVTLISQQATLLASNEAFKKQAESASEAAKKYMEENDQLKKGAAVDGGKLDVGNAEVKLEEENRSLKADLQKLKDELASTKQKLEKAENQVLAMRKQSEGLTKEYDRLLEEHAKLQAAVDGPMDKKEE

SEQ ID NO: 487 - protein, 192 aa, Homo sapiens
MDGSGEQPRGGGPTSSEQIMKTGALLLQGFIQDRAGRMGGEAPELALDPVPQDASTKKLSECLKRIGDELDSNMELQRMIAAVDTDSPREVFFRVAADMFSDGNFNWGRVVALFYFASKLVLKALCTKVPELIRTIMGWTLDFLRERLLGWIQDQGGWDGLLSYFGTPTWQTVTIFVAGVLTASLTIWKKMG

SEQ ID NO: 488 - protein, 211 aa, Homo sapiens
MASGQGPGPPRQECGEPALPSASEEQVAQDTEEVFRSYVFYRHQQEQEAEGVAAPADPEMVTLPLQPSSTMGQVGRQLAIIGDDINRRYDSEFQTMLQHLQPTAENAYEYFTKIATSLFESGINWGRVVALLGFGYRLALHVYQHGLTGFLGQVTRFVVDFMLHHCIARWIAQRGGWVAALNLGNGPILNVLVVLGVVLLGQFVVRRFFKS

SEQ ID NO: 489 - protein, 239 aa, Homo sapiens
MAHAGRTGYDNREIVMKYIHYKLSQRGYEWDAGDVGAAPPGAAPAPGIFSSQPGHTPHPAASRDPVARTSPLQTPAAPGAAAGPALSPVPPVVHLTLRQAGDDFSRRYRRDFAEMSSQLHLTPFTARGRFATVVEELFRDGVNWGRIVAFFEFGGVMCVESVNREMSPLVDNIALWMTEYLNRHLHTWIQDNGGWDAFVELYGPSMRPLFDFSWLSLKTLLSLALVGACITLGAYLGHK

SEQ ID NO: 490 - protein, 233 aa, Homo sapiens
MSQSNRELVVDFLSYKLSQKGYSWSQFSDVEENRTEAPEGTESEMETPSAINGNPSWHLADSPAVNGATGHSSSLDAREVIPMAAVKQALREAGDEFELRYRRAFSDLTSQLHITPGTAYQSFEQVVNELFRDGVNWGRIVAFFSFGGALCVESVDKEMQVLVSRIAAWMATYLNDHLEPWIQENGGWDTFVELYGNNAAAESRKGQERFNRWFLTGMTVAGVVLLGSLFSRK

SEQ ID NO: 491 - protein, 505 aa, Homo sapiens
MRLRRLALFPGVALLLAAARLAAASDVLELTDDNFESRISDTGSAGLMLVEFFAPWCGHCKRLAPEYEAAATRLKGIVPLAKVDCTANTNTCNKYGVSGYPTLKIFRDGEEAGAYDGPRTADGIVSHLKKQAGPASVPLRTEEEFKKFISDKDASIVGFFDDSFSEAHSEFLKAASNLRDNYRFAHTNVESLVNEYDDNGEGIILFRPSHLTNKFEDKTVAYTEQKMTSGKIKKFIQENIFGICPHMTEDNKDLIQGKDLLIAYYDVDYEKNAKGSNYWRNRVMMVAKKFLDAGHKLNFAVASRKTFSHELSDFGLESTAGEIPVVAIRTAKGEKFVMQEEFSRDGKALERFLQDYFDGNLKRYLKSEPIPESNDGPVKVVVAENFDEIVNNENKDVLIEFYAPWCGHCKNLEPKYKELGEKLSKDPNIVIAKMDATANDVPSPYEVRGFPTIYFSPANKKLNPKKYEGGRELSDFISYLQREATNPPVIQEEKPKKKKKAQEDL

SEQ ID NO: 492 - protein, 597 aa, Homo sapiens
MAAVQAAEVKVDGSEPKLSKNELKRRLKAEKKVAEKEAKQKELSEKQLSQATAAATNHTTDNGVGPEEESVDPNQYYKIRSQAIHQLKVNGEDPYPHKFHVDISLTDFIQKYSHLQPGDHLTDITLKVAGRIHAKRASGGKLIFYDLRGEGVKLQVMANSRNYKSEEEFIHINNKLRRGDIIGVQGNPGKTKKGELSIIPYEITLLSPCLHMLPHLHFGLKDKETRYRQRYLDLILNDFVRQKFIIRSKIITYIRSFLDELGFLEIETPMMNIIPGGAVAKPFITYHNELDMNLYMRIAPELYHKMLVVGGIDRVYEIGRQFRNEGIDLTHNPEFTTCEFYMAYADYHDLMEITEKMVSGMVKHITGSYKVTYHPDGPEGQAYDVDFTPPFRRINMVEELEKALGMKLPETNLFETEETRKILDDICVAKAVECPPPRTTARLLDKLVGEFLEVTCINPTFICDHPQIMSPLAKWHRSKEGLTERFELFVMKKEICNAYTELNDPMRQRQLFEEQAKAKAAGDDEAMFIDENFCTALEYGLPPTAGWGMGIDRVAMFLTDSNNIKEVLLFPAMKPEDKKENVATTDTLESTTVGTSV

SEQ ID NO: 493 - DNA, 5918 bp, Homo sapiens
gccagaaatcttctcccaaaaatatatacagcattggatgtcagcactccggcaagtagttcatgtcaatgtatttctgtgccatcctgaacttgtttctaatccaaaaagaaagtgattcatttttgccctttaggaaacaggagcaattttcatattgtgaaattttggcaaaggtctcctcttcacaataggcaaaggggagaaagctgcatttggtaccatctgtcaattataaatccttcaaaactagcaatgacacagaaataaaatatgtagtatgaatgtggacaatacaatatacatgtacaatcctgttaggaagaattgtcttcatatagctcatatccttctttcttaaggcattaaagcattttatacttcctatgtatcctattacttcctttttggcgttattaagattaaaatacttgataactttgtaactctgttttcctgacatgactcaattatcattaagtaatacttatcaataaataataatctaataaaacgttacagcttaaaatacaatagtgtggactataatattatttctttattatgtggtaaccccatgggaaaaccaacatattaattaggatgcttctagctgttagccacagaactccaactaactgtggtataaaataaataaccagtatgttgagcaatgagaccgtaaggtgtgtaattagacagtacctttatttaaaggcattttagtctcttattaagatgtattcaatatggaaacttttgttcatgccactggatgaaaactcagacactcaggcactcatgatatttctaacaactcttaggctaaattaataggtagtagatagatagatacataaatacatacatacatacatagatgatagataaatgatttagagtcatttaagtttgaaaacttgttcaagcttcataattaaacatttcccaccctagataataatcacagctttgaatacgattttaagttacgacattctcccttcctaatgctgggggcttctgaaggcaggaagctggagaaagggcacaaactgctgtccttcctcctctttcatctccgtccctccttcttaatcctactggtcatgcttgttgactttcttcagggccaaaccagcctgagcagctgggagagaagatggtaaaggaaaagagaataattcttacttgactggcactgtgactgttactctcacatgattacatgagatctgaccatcgatgaaaagtgagtcttcttcttggggattttcatagtttattcagaaaccaccaatgaaaacaggcacttcctatgatgtaggtgaagcattttcctctccctctgaccatttttctctgcttcagaatttttcatcagccattcctcacggtctctctcagttgtggtcccactgcccttccagatggccctcacttggacacatttagaatggccccagactccagattatcacctatagctcaccccgtcccactgccactccctatctctttctctctctcttgtataacccacatctaatctttggtgtttcagtccattcagactgctataagaaagtaccataaactcggtggcttggggctgggaatggtggctaatgcctgtaatcccagcactttggggagccaagatgggagactcacttgaggctaggagttcattaccaacctgggcaacatgtgagaccccatctccacaaaaaaaatttttaataaaaaaataattttttaaaaaataggtggcttataaacagtaggagtttattgctcacacttctggagtctagaaagtccaagatcactttgccagccgattcagcatctgctgaaggcctgttcctcatagatggctttttcatgatgcatccccctccatcccctgtagaagaggaaaaacaacttccctcaggcttcttttaaaagggtattcatcctatccacatgggttttgctctcatgatgtaatcaccttccaaaggccctacttcttaataccatcaccttggggggttaggttttaacatatgaattttagagggtcacagacattcagaccatagcacttgggagagtctcattcttccttttgccccaaaatctctgcgactgcaggcccatgccaactctgaccacctctactgtggggctcatctctcacattttcaattgtcctatcaggagcagccactggccctctgttcccctcgctgcaggggacacgtgcctagatcttcttaaagaccctttatattgactagaggtaaaggaggaagcaatatttacccgttctctttaggaaatatatttcactaaccctatatatccatgatatgtaaggggttcaagaacttataatcagatcttcgccacctgctttgaatattgttttcatgccataactgaaactgaagaagaaaaagttccatttaatgcccttaaacctcatacaaaagagagactggaaggagaaattccaggtttggttaattcagcagttcaacaatgtcagtgctcttactgtttctctgtgatcctccagttttctcttctcatggtcataagaaagccactgcagggtcaagcatcatgtccacatttgaaaacagctaaagacaagaagggaaaagtacctgtcttgtgtccgtctttatagccaggaaaaacttctcagaaattctcaataagccttttcttaacatcttgaaaggcagagctgcttcacatgccccgacctatagcaatctctaacaagaggaatggaatgactgcaattggcttaaactagttgcctcccttaagaaagtgtggcacatatacaccatggaatactaagtagccataaaaagaggatgagttcacgtcctttgcagggacatggatgaagctggaaaccatcattctcagcaaattatcacaaaatcagaaaaccaaacaccacatgttctcactcataaatgggagttgaacaataagaacacatggacacagggaaaggaacatcacacaagggggcctgtagggggtggggggctaggggagggataacattaggagaaatatctaatgtaggtgatgggttgatgggtgcagcaaatcaccatggcacgtgtatacatatgtaacaaaactgcacattctgcacatgtaacccagaacttaaagtacaatcaatcaatcaatcaatcaatcaatccagttgcctcccaagaagtatgagaccctgggtccaggacttttatgtaaaatatgatacactggagtacaagaggaaaatattaatgccacctcaatatttcttatccctgactttttaaactttaatatttgggttcttattttattttattttaagatggaatctttctctgtcgcccagactggagtgcagtgctgcgatctcggcacactgcaacctctgcctcccaggttcatatcttgaaataactattcttgattttcctagtctgacccaccctaccctccccaaccaccccaccccccactcaccaccatgtcctcagcctctcaatgtcataattttggttactcccatatttgttttttggtttttggtttttggtttttttttgaggcagagtatcgctctgttgtccaggctggagtgcaatggcacactctcagctcactgcaacctccgcctcctgggctcaagccattctcctgccctcagcctctcgagtagctgggattataggtgtgcgccaccatgcccagctagcttttgtatttttagtagagataaggtttcaccatgttggccaggctggtctcgaactcctaacctcaagtgatctgcctgcctcggcctcccaaagtgctgggattacaggcgtgagccaccgcaccctgcctggttacctcagtatttgaagttcactgctgggccatgcagtacattgtgacaaatttttcttttctgcctaagtttttgttttcctccaattcaacccctatctctcttccaggtgtctaaatttcctcataagacattcagatacagcaagtattgtattacttctattttctcacaggaatctcccctggagttttctgacccagttcacaataaactggttgccatcttgcctcatgtagcatttcctctgctttcttcatcaccatcttgggtttcactttgcctcttttctgtgttggatcctctgttttctgaaacctatgacatgcatttttttctgtttacttttttgttttgctaacccacatcctccagtggctttctgagaaaaaagtacatggggcatatgtttctcgagagcatacatatttgaaaaatctttaattgacattcctacttaagtcataatttcactgggtatggaatcctagagtggaaataaatttccttcacaatgttgaaagcattgctctaatcctgcctagcttccagtagtgttattgagaagtctaaagaaattctgatttcagatcctatgtttgtgatttgtatttgtttctggaagcattcaggatcttatctttgactcctgtgttctgaaagtgcccaaagatgtgctttcatatgggtctattttatacgttgtactgggctctcaacgggtccttttggcctaggaaaccatgtcctacaattctggaaacttctcttgaattattccattggtggtctctcttcagtttctctactttctcttcctaaaattcaaatgatattcaaatggaccacctggactggtcctccaattttgtatcttatcttcttttttctatatgttcgtttttgtccaaattttgagaaagtgtctcagctttacattccaagccttctttttttttttttttttttttagacggagtctcgctctgtcgcccaggccggactgtggactgcagtggcgcaatctcagctcactgcaagctccgcttcccgggttcacgccattctcctgcctcagcctcccgagtagctgggactacaggcgcccgccaccgcgcccggctaattttttgtatttttagtagagacggggtttcaccttgttagccaggatggtctcgatctcctgaccttgtgatccacccgcctcggcctcccaaagtgctgggattacaggcgtgagccaccgcacccggcctccaagccttctttgcttccttgccactagtgtttttaaattctaagaattcaaactccttttctgcatattacaatactccaattttatagcatcatcctgttgtttcacggatttatgatatctttcagaggatatagatgatagttgagttgtggctatgttgttgttgctgttctgtttttttccttctatgtttccttcaagttgcttttgtcttcttgaaagttttagtctccatgttttatggtacatgtgaatggtgatttttggttatcttatattcagaagttagggaccaaacaatagttgattgtaaggctcaagtcagctggcagggtgtatgtattacaaggatcactgtagagttacaggcctggaatgttttatagggagaacccctgacatcaaaacttttagcatttctatcctaatatttgatgtagtctgattcctcagagaaggggtgacaaatctcctgcctcatggacatgggcctgactgcaagtctctggaataagatagaagaaaaagaccggcattctcaaaattcagaatataagcattcacttcttcctccttctatctggcatccccagtccagagaatgtgtctgatgagggaaccatccctcttctggctgggttggagaggaactgtcacctagtgcaaggagtagagggggcatcagagactctcacctatttattgatatgttttggctgtgtccccacccaaatctcatcttgaatt

SEQ ID NO: 494 - DNA, 4972 bp, Homo sapiens
atcttggctaacccggtgaaaccccgtctctactaaaactacaaaaaattagccgggcgcggtggcaggcgcctatagtcccagctactcggtaggctgaggcagaagaatggcgtgaacccaggaggcggagtttgcagtgagccgagatcgggccactgcactccagcctgggctatagagcgagactccgtctcaaaaaaaaaaaaaaaaaaaaagggaatgaatacatctggtttttaaagagaacatgcacacaaacaacccatgagcatcaacagcttttcaaacctgcaacaggtacaccttaaaaaaaaaaagacacccacaattgcacctgtccaattgccagtttcatagcaccaggaagtaaattagccctaccttcctttatgcatatagacttgttctatttctttagcattagcagaaagttttttgtaaatgtataaacagcaaaatctagtagtattaagttactccaaaatccttatattaccatttgctcccaattattttattaactaggggtaattcagggagatacgtgcatttttcaaaacaccatgcattacggttagttgtacatatatatgatcctaccctattagattgttggcttctcaaaaacaaaagctgcgttttagatcttccaaacatagctgtttttacacggagatgcacttatgtactgaatgtataacttaaaatagatttaaaactatcccagcatctactgcaagttatttggcagcaaagatttaagttcacagattcgtggaattaatcctacacactgaaaggaaaagttgactgctcttcagaaaaagttcttatccctcttctaaaataaaggaaaaatgaaagaaaggtaagttgagacccaggatcattcaaggatcgtatctgtccctagtctggccaattacaaactagtatttgaacttgttttaaatcttaggtgaaaatacagttaagaattccaagacccaaatccaaaaaagtctgcttttacagtgaacgatattcttaggagcttctcacatccactttaaattcaacaaaagcagccgggcacggtggctcacgcctgtaatcccagcactttgggaggctgaggcgggcggatcacgaggtcaggagatcaagaccgtcctggctaacacggtgaaaccccgtctctactaaaaatacaaaaaattagccgggcgtggttgcaggcgcctgtagtcccagctactctggaggctgaggcaggagactagcctgaacccaggagacggagcttgcagtgagccaagatcgcgccactgcactccagcctgggcgacagagcgagactccatctcaaaaaaaaaattcaacaaaagctacttacaaaagaactctaacagataagccaacccttcccaccctatggtgcctattttcttctggctcagaggaaggaaaataggctgacaccaatttgctacataaagaccctttcatctaagaatttcaaaatgccttagaaaactatattctcccaacctgcttataaagtattactaataccatttacagggatttctcaggagataacagcccacacaacttgctcagagcaacagagcatatcgaggcaaacattaagttgtgatttacagtgctgaatgcattctatgctagatctccaagaactttattaacatgtaacttagatcatcctaagaaaggcagacttgcattatgttccacctttaaaaatctgcctttaggccaggtgcggtggctgacacctgtaatcccagcactttgggaggccgaggtgggtggctcacctgaggtcaggagtttgagaccagcctgatcaatatggagaaaccacgtctctactaaaaatagaaaattagctgggcgtggtggcacatgcctgtaatccctgctacttcaacctgggaggcagaggttgcgggtgagacaagattgcaccattgcactccagcctgggcaacaagagcgaaaccccgcctcaaaaacaaaacaaaacaaaacaaatctgcctttagacattgctacaaagtaaaacaatctcaagttcaataactctccccaatcatataaagaatgggatttccatgccggttaatctttaagtcattaaacagtgatttcctaacctaaggtccaagtgctactaataattatttaaatgaagcttaaaaagaagaaactgcactactgataaatttgtctgtgaccaggaatagaaagcaagaagcgcactggtacttcaaagaaaccagtggcgtctaccttattcccgcagtatagactagttcaggcaaccatgagactgagttgcctcagagataatttagctcccctctttcccctttttcctctttcttcgctcaagagttgctacccagggttcaatacagacctccatttcctttcctcttttcttcacccttttctcctatattttcagttccttttctaggagtttaggttaattccaagcattcttgagctctttcccacaacccatactgctcaacacaaacgtgatagggtggatgacaaaggtcacatgtctccctgtaaccaaataaaggaagaagtcacgagtccactatttttctccagtgaggttttgctgttaacacttacctataacaaatggatttttaagagactttttggagccaaagccaggaatcagtcaggtttgagtcccacactctaacatatacacttatcctaatagctacctccctaaacttttctgttccttctttcatagcagcttttctcccttcataccaccatggcttctgtttaatattgagttgtgaagaaatgtggtaaaattcctagtttgatttgccagaattagcaggacattaggtatagtttctctttcatcttaacttttttttttttttttttgagacggagtcttgttcttgtcacccaggctggagtgcaatggcacgatctcggctcactgcaacctacaccccccggactcaagtgattctcctgcctcagcctcccgagtagctgggattacaggcacgagtcaccacgcctggctaatttttgtattcttagtagagacagggtttcagcatgttgaccaggctggtctcgaactcctgacctcgtgatccgcccgcctcagcctcccaaaatgctgggattacatgcgtgagccactgtgcctggcagtttctctttcatcgtaattttctttaaagttatgtttgtgtgtatatattttgtgttttgttattattaaaggtgaactttgctatgataagacagatatctgtatttttttttttaatgaaaattagtttctgaaaagaccacagactgtgggaggggacgatctgggttccaatcttgacctattacctattagtattatcttagccagcttgcttaacctctcagcctccagtgtctttatttataagacgggaatactactgcagttgacccttgaaggaaacagctttgaattgcacagatccacttataccaaaagcaataaaaaatacaggtctgcctgctccttaaagaggaaaaagcttgtgagaaataaagaaataaatactgtatttgtgagatgtgatgtttcacatccggtgaatacagagagctgactttccatatatgctggttccacagggtggactttgggacttgagtatgtatgaatttgggtatacacaagggtcctggaaccaatcccctgaagataccgagggacaactgtatttataccatataattactacagtgaatgaaaattatgtaatatatctgacagtgttttcaactactgagtaggtacttaataaatcaaacaatcccaaagatagcaaatgtaaaaaaaaaaactgtatacaaaccagtagtttcacttctgaatgttgctttaggaacagaaaaaaatttaattttttttattttttatttttattttagatagagtctcgcttggttgcccaagctagagtgcaatggtgtgatctcagctcactacaacctccgcctcccgggttcaagtgattctcctgactcagcctcccgagtagctgggattacacgtgtgtgccaccgcgcccagctaagttttgtatttttagtagagatggggtttctccatgttggccaggctagtctcaaactcctcatctcgtgatccacctgcctcagcctcccaaagtgctgggattacaggtgtgagccactgcgcccggccccagaaaaatatttttaaaggttaaatcagtaaggaggaacacaggaatatattccactataacaaataccagtgaaaagaaatttgccatataacaaaattttaaaaacctacgaaggcttcaactattcaaagtgtgtacagtaacactttgaagggtaattctctgtaccagatattctgaagcagatccacaaatagtctgagtttatatgcaaaattatttatgtgcatttttctcaggaatagctccttagatttcagcagattcttaagtctagtatctaaaagaggctttgaataactgctttattcaaataagatggcattattattggagaagtaaaagagtctcactaaataatctggactcactcatttgaaatactttggagtagataaaatctccacccttgctctgtggtcaaatcatatacttaatgacactttaaaaacccagtgctggctgacttgccaagcctcaagaatataaataagggcgtgagatgaaaagaacaacctttcaggttacgagagcctccacaacacctcaaaaggcagcaatgactaggagtgttattttgatagacagggagggtaagaaggactgggtatgtggctactaaaggatgcagcattctaggaactccactcagggatcaaatgaaaaatatctgcattattagtttccacttactttcttcgaaaatt

SEQ ID NO: 495 - DNA, 12876 bp, Homo sapiens
tgctcagggtccctggaaagttccttcccttgcaaagtgcttagtgtgttaccaatagaccccagcaagacattgacccaaatgttgtcctctgtgtgtgtacgtgtgtgtgtgcgcatatgtgtgtgcatgtgtgtgtacatgtctgtgtgtgcgtgtgtgtgcatgtgtgtgcgtgtgtgcatgtgtgtgtgtgtgcatgtactgcacaccgagcacctgcctgtggatggtgtacacacaaacacacccaccctgcacagacacagaggcaagccgccatccacacatcgcgtcacctcctcggtggaaggcacagtagtgaccctggcatttcgtttttctagtttggttttgtccaagctggcttgtgaggtgcaggtgtcctcctgcatccagggcagggcaatgtggtctgtggctgtggtggtgtgtgggggacagatgaaggtggaagctcgcactgcaccccaccactgagcaccggatgagggcgaagggctgtccgcctcactggactccccgtgactgcatctacctgcttgctctggccagacctccccactagagcatggtccaccccaatgcccgcctccacccctctccttcagcacaggccaagcctccattccccctcccaacgtccaccctccctggcctgtgccactgcatggactcctgacttccttcccatccttacggggtggtcggcctgtgctgtctcaggtcctgagctgcccctcccttcccaagccatgcaccagggtccagcccagtgaggccatgtggtgaggggatgagccatggcctccatcaggacaagtggggctgtctctacaagagggctttcctcttccaccagtcttgggtgccagggagagaggcaaatatgggtagtggtgggtacattggctagatcagagggggctggcttcccagaagttgggagggtcccttttaaagtcatagaaagtcacacacctgcttgagataacagtagcacttttggtacctgctaaaggcaacacttactcccaatcccacaacgctgtcagaggactttgcatttcatcgcaacaggattgagatgactgaaagttgctgagcaaacctcagatgaatgaataatcacagaagggttacttggtgactttcacgcagtgtttgtgggcacagggttcctgaggttttgcagaacaccccagcaaggatcttgttgtggtgtcgatggctgcaggccacaggctgggaccccctgtcacacagggcaagagacctcccctggcagcctgtgctagccccccaggccaggcctgcagggaaagggggctaggggctggaactgatctcacgacagcctgtcctcggctccagcatgtggctccctggcttctggccacggctggctgggtcccctgtggcaggagctggccatcctggagttcaagggcccctgaagcactgcccacgcctgatcttcctccccagtgttctctccgctccaggggaagtgagacagcccagcccaggcaaacaggtccagctgcagctggcagccagtcccaagaacgctgccactcggccctccccgctgacctctgcacaccctcgcccggcgccctgccaggccttattcatgggctggcagtgccaggacctctcccggaggcggggcagagcagcagcttctcggccctgtgccgagcccaggcctgcaccctaggcaggcactgctccgtgatccaggaaccacctctctctacagctgggagtgagcagtcagagagggagacagccttgcccggtgctacccagcaagctagtcaccgagtgggcagagggaggagcggccctcaccggatgtcaagcagcctgggtccccagtccagctctgcctgtccctcgcaataacgcctcaggtatgttacggaccactcagcttgtttccctgtaaggaaacgtcccttctcccttgaaatatgtccctttctatcctcccggggccctcgcaggccaacagccaggaaggttggagctgagctgggctggcggtagcaacagcagctttctctcctgcattggctccagcaagtcttgctcagacgttggtggggtggggtggggagggtcaccgaggcagggaggagcctgggggttgtcctgtcgtcctcctgggcccctagagtagaaagggcacgtgaggaccatcgagggtccgaggggcatggacaggtgtgaggggactcacgggggtgggtgaggtgggggaaggagcttcccagagcagcacgggggcccaagcccaccctcctcgccacccctgccccacgaggccgtctgggttggggatgccccaggggggcctttgcgcaaacgtctccactggcaacagccggtcgcttggcaacccgcacgccccaggcccctgcgccccggggagccccgagtggggcgggggtgccccgcggctcagcgaagcccctcctgcagcgggcaggggaggggtgcaggcagcaaatggaaagcgctcacccaccccagagccagccgggaagtccttgctggagctgctctccggcactggggcacctgggcagccatgtgctgccacccaggaaggcaggagacccaggctgctccccaggatcctggcaagccccttcccttctgggacaatagaggcagcaaggccttctccgggggctgggtgaggagagagggcctgcaggtgtgaggcatctgttgaggcacaaaccagaggctgtgctcagctcagcaaaacacagtgcctgtgggtggtgggtggcagggtcatttcaggtgggatccaggatgttcaaagtgacatccaactctgggctggtccctctggggtcggctgggggctaagggcagcagctggacatgcctcttcctggaccctgggagctggtcgcctacagagcccaagctaggagctgctggcagtcattgtgactaggggtccccccatgcagtgcctgcattttagggagacattagccacccttgacgccagcctgatttggggtttagtcaccactcagggccatgcattccaaccaaaaagttacaggcgtccccatcttaactagcaccaaacccagcagtggggccgatgaacttggccaagcagcctgtgccaggatcctggtagaaagtgggtttgggcagctgcaggtgtgaaacatggcttagcttctctcctgggactggggcaggctccagttcagcagcccacctgaggcacctgcaaacacaggtgagcttttacacacgcccagcccccagagaaggccggggaggccttgccacctctgttttctcagaagggaaggggcttgccagcatcctggggaggcgtctgggtctcctgccttcctgggtggcagcatgtggccgcccaggtaccccagcgccggagagcagctccagcaaggacttcccggctggctctggggcaggcgagcatttcccctttgcctttacacacctgggcttctgcggtttcccaagggctctggtgaggaaacgggcttaggtgctgagaggggggcgcataggagtgggggcatttggccagggtggctgagtcccagcgccaccgttccgcacccggaaaccttggctgtgatgcttctctgtggcttctaacctggaacccgggggacatccccttgccccagtgccttctcaatgccaacggtgacccagcctgagctccccacctgccaaggtccgagttgagctctcagaacccttggcctttccgcagggcctccgagggcgtctggtggatcctgtgcgtgctctgcggcaccccctctaggctttccccactcactggaggccccagcctggcttcagagggactcagtggggcttgaccacgtcccagctgcgtgaccttgagcaggttccttgacctctctgggcctcggctttctcactctgtaaaatgggcacaaacaaggctttgtgaggatgagtgtggctgtcgtgcctgtgagtgcttatgtgattctcactcctgccccaggtcccctccagctcctcccttttgcggtcccgaggtctagcctaagtcccccttgcttctcttgcagggtgtttatttctctcggcttcttcctctccctacgctctcactttgttttatttcatctccgtccctctgccctccccttttcgctatcggtttcaattctccgctgaaacctctgaggaggccctgcccgccccactgtcccgccggccctccccgcagcacccaccctgcccggcttctccggggcttgccctcctgtagcccaggagttggggctgggggcggctgtgctgacatcactggcgtttatgcactgctccttgcccaacgcaaatctcatcctcgttctctctgaatcaattcacttttattgcctcagctgctcaaaagcaatttttcaagaacaaaaaggtcagcacgtccaagactaatcaattctcggagagctcctgccgctgccaggggagccgggctccagcagccccccgcccttcccgccagcccctcccaccagccccatcacttttattgcttcatgatgcctgtcattagtggtgtgtttgagacgccccacggtgttcttacaacataaaacctgggtgacttgcagcgggggtggggtcgggcgcatttatgggccctcgccggctccggacagtaagagctgagctgatggatcgcctgccaggggagccagcacaggaggccttcagccacttgcttacaagcagagccggggctgcctgcctgctcccaggcccacccctctcttcccctcaactccccatcactgtggccttggcatcggccagccgttatgccttccaggaatttgccctcaaggcctcactggtccccaccacagccctacccctccctgggcgtcgcccgcccccccccactctgcccgccacgatgccaggctcagtccctccagcactgtgaggtctacattgccattccacagatggggaaactgaagcccaatgtcacggaggtaggaaggggcagacgtagacttggaaggattctgtggcctgttcgaggttccgtgcatgagccgtgctccgtggagagccaggtctaccgttccagcctttgctctcccaggcccctggctgtccatgtcccacaccaccctgacacctgatacttgacacccgtgtcaccaacagctacagtgcaccacggccttggaacaccgcactcagtgctctgcctggatgagccctgtacccccatgacgaccccactgtggacattcttatgtccattttacagatgacgaaactgagacgggcggatgcagtgttgtgcacaagccacacagctggaaacgtgggctggggactggaacccaattacccgctttggctctataatcctctttttatttttatttaatttttttatgagatggagtgtagctctgtcgcacaggctggagtgcagtgacacgatctcagctcactgtaacctctgcctctcgggttcaacccattcttgtgtctcagcctcccaagaagctgggattacagttgtgtgtcaccacgcctggctaattttttgtatttttagtagagatggggtttccccatgttggtcaggctggtctcggactcctgacctcaggtgatctgcccacctctacctcccaaagtgctgggattacaggcatgagccaccgtgcccggccctttaatcctctttttaaaacaccttaggatatgatatatccagaataggcaaatccatagacacagaatgcagatccgtgtgccagtggctagggggtgaagaggaactgctgaatgagcgggcgtttcctcctggggtgaccagcatgttctgcgactgcagatgatggctgtgccaccttgtgagggtactaaatgccgccgaatggtacaccttaaactggttgattttatgttatatgaacttcccttccatacattatttgaggctgggcacggtggctcacacctgttatcccaacacttttggaggccgagatgggtggatcatctgaggtcaggagtttgagaccagcctgaccaaaatggtgaaaccccgtctctactaaaaatacaaaaaaattagctgggtgtggtggcgcatgcctgtaatcccagctactcaggaggctgaggcaggataatcgcttgaatccgggaggcagagattgcagtgggcctagatcgtgccattgtactcctgcctaggtgacagagcaagactccgcctcaaaaataaaaaataaaaaataaattatttggaaaaaaaaccagcttaggtttttctgccacctgtttggcaagagtctgggtgtccccacaggccgtcttcagctgttctcctaatgcggtctgtgtgctagcaggagagacgtcgagacatcctctgcccagcaggagcgtccgtcacctctcccaggaaacattcctggctgtccccaccagctccaaagtctccacctctcaaacaccatgtcttctttggtgtctgggacacaggctgttcttggccaggccacagcctcatcatgcatggctctgcccggtggctcacgggctctgtccacaacaccgggggacaggtgctcttatctctcccaggagtcaggatgagacgtgcatgcatgtattgccagcttctcttgggatcctgggtgcttcctcagcccttggccgtcccttggcctgggctccccacctctctggcacccaagactggtggaaaaggaaagccctctcgttctgagttgagatctcagaacccttggcctttctgcagggcctccaaaggcgtctggtggaccctgcacctgctctgcagcgccccctccaggccttcttgcacgggacagtgacagggagttctgtctcagagcgagtccagcagggcctccacagagtgcaaggttgcctgccctgcctgtggaagagcaagccttgtcccctgtttcccagaccccctactcagtggcctctgaatgtccccaatgtgggcccctccctggctgcccctcttgctctccaagtccgagcccacccagagcccaagccctcggaggcccctgccacctggaaagatgacactggggcagggttctcttctgatgtctgtgttttgtcttgtgggccttggggtgcccctgcccctgataagaaggggtttcagagcagaaataaagcctcagacaggtgagcctctgtggcacatggcccctcgagccagccatgcatctgggttcagcccctgccaggacacttgaccaggccccttaccttctccgagctgggatcatgctgggaagactgaatgggacgcagccggtgaaaacgcctggaagagagtaaacgccattttctctaagcatatttatttctttaacaacagtgacgaccatttgtgagccatctctctgtctcaggcacggtgctacatgccaacgaaacctgctcccattgaaccctggccagccagtgaagaaagggttgggcctgggaggtgccactttacagacaggggcaccaaggggcagggtggcaggaggcccaccggacgttccccatgaagtagcagtaccagcatccacacccagcaggcaccacgctggcccgcagcctccctgccagcacgcctggcttcccggcctcggaacttgatctgctccctcttccggacactggggctcctgccaagtcctgggctgggcagcaactgctgaacattctaagaaatccctcccagggttttctcaggagcccgggtggggcaggaagtccccaggggctgaggggaccgtggcggcaggtggcacccagagcagcactctcctggggcccaggctgttgggccagaggcaggactgtgaggcctagtgtagggcctcctgccagtggccggcacctacttgtggggctgggggttcccccagcaggttgggctccccacctgacacactcacagaccttgtgccttggagagccagtgttcccggggccacatagctatgccgcccaggggctgggcctgtcccagctctggtcccccggccccaggtcctggacgctggctccgcgcagcagcaggcggcctccggaggacacgatgtgactggctgccgctacgtcgcactcagatgagtctgcgccggatcgacctgctgccgagtcctgccggacaggcacaggcagggagtgaaaattatctacccctttttatttcttaataactgaatgaaaataaacattggtggtttgacaaataactacatattttcaaacccagccagtccaggggatgcagtttccaggtgcgttatgcaacaggacgccgccgagatgctctgagatgtcccttggctgtctcacgggttgtctctgggttccctcccacccccactctcctttgccaccctctccccagcccccactaccctttcacgcttctaaattcaagggccacactgtcccctgaacagaccaatcacaatgagatccattatagttccaaagataccacgaaaaaaaaaaaaaaacgtggggggtgtccaggaatgcagccgcaccccagagagcagtacaatcagctattgttgtgctagaagtttctctgtgataagaagggaatctagcaatgccgccttctgaactgattgcaaaacagaatagaaagttcaaggccccgagatagctaagctagcagcccctccagagcagccccaggccacacagctgggctttggggctggccagcccctgtccttgcatgcatctgcacagggctccttgcaagggggcccggctccatatcccccacctcgccccctccccatctgggcctggggcggctgagctggcttcctgcactgaggggaccctccggcctccttcctgaagcagctgcccttccccgagggactcccgggtgagggcctcccacattgtctgctttagtgatgctggttctcccacagacgctgcctgtccaccccgcacagatggcatgactgtcctccccttgcccgggcagggatacggcggcacagagatgggggccgatggctaggacctgaactccaagctgtgggccccaggtttttcatctgcttaggccactccccactgcccagacgtcccctggggtgtccggtttgctggaagggccaccactggccttgagctcccagtgtcatttccgggcgctgacgcgtgagggtctccaacaggcgggcccacgggaagtgctttctgtgcttggcccttcatgctttgcctctggttcctgaaatgggcactggaggtgggcacagttactgtccacatttcacaggtgagcaaagtgaggcttagagaagctaagtgacttgtccaaggtcacacagcaaaagaggggcctcgaacagaactaaagggcccatggtgcacaggcagaggttgccatagagcgaccagggccttctcaaatccggctgtgagcagaaacttctcccgcccccccgggcccaccatggtgacctgtggagtgcctccatgcgccgagatcgcttatcagcccatcagcactggtcacggccacttttatggtctgtgttctctcgtgtgtctgtattcgtgcgacgttccttcattcaggcaatatttgctgagcatccaggaggcccccgtttattcatttatcatccagcaaacaccgcgaggcggctgccagctggggccgggctcggtgcgggctcccgggtgggggcgggcatcacggggcactgcgtggcggatgtggggagggtcgtgatggggagggacgtgctaggtgtgcacagagatgctggggtgcaggagcgggtgtctctctgagcacatggcccggaaactgagggctgtgggtgcactaatgtgggggagagaccaacttcctttcactggagccctcaaagtttctggcagggataaccaggatcctagcgtctgacactaagttcagggaggtcacaggacgtgctggaaccaggagttcagggttcaagcccaggcctttctcctcatattgaacgggcctctcctggtaccatggggtgcccttgatccaaagcccccagtgaggaacatctcacggtatgtggggatgggcctttgccatagcagcccatgcaaggccttggggccagagccagccccgcagggaccctccttgcactattcttcacatacaccattgaggacaagaggaagggacacccctggcctggccatgtggtgacagctccctgtgcattgacccccaggggtgctgcgatctaggagtggccatgagacgagggggagggagacactttcccgatggtgtggcgggcaggtctggcaggcagggttaggcggggtcgtggaagaggctgtcctggcccagaggctgccaggcctggcctggggctggctcctcttccaggaaaggtgtgaggcctcttgtggctcagcactttggaaagtcagccaagttctaagcttacaggtgcatgaaggttccatgtctgtggtttcaagaacataaaagtggggtgggaggccctgggaggtggtcctgtgtgggggcagccaagtagggggcgtgggatggggaatgaggtaggggatggagtaagatgtgggagaagtgaagtgggggtgaaatggggaagtgggagtgggaggggaggaaggggcaggtgctgggaagttggcccttgtggccctaatctgtctgtgacagcttccgctcctacccatccacagggacaagaacaagtatccccttccccagcctgctccctcttaaaaaaaaatcctcttcctatttagtatgcaacaggtgctcaatgtgtgctcctaccgttctccaggaaaggagggagctaagcaggacacagcccagagctcagcactcccctagcctcccaccctcacctcccaaggcaagggccaaacccaacggtctggctggggacccccaccagcctcccccaccatggatggaggtggcacgtcttgaggcccagagggggcagacatgacgtccaaggctacacagtgagtctagaccacatggcctgctcctcacgccctggagaaagaaaaggcagcccaaagcagggagggtcatgccccacctggagtgggccttgatgaccttgacgtccccttcccaccttgaaatatttaacaattcttccggagtttccccaaggaggcctattcacacaggcgggccatctgatgatctgcccctggggggtttctcctgcagccacctgggaggggcgtggcactggacagggaggtccctttaccccacacaagaaggaagagccgagtaacccaccctgacgggcagtccctccactgggagctggggccagggtctgggcgaggggctggagtcagactgtgggagcacggagcccaggatctgagcctgcccgcaggctgcctgtcttctggtctctctcctcctgctccagcttggccgagccaagctgccgaaggccaaagagcagcatgaactcctaagagtgacccaaataaaccttcttttcaagaaaaacaggccctgcaagcctgtgggtccccatgacaagggatccatcaggcagacagactgcacttcggttcggttggtgaggactctgtcccactccgccagcagctcccagcctgctgggccctggccctggtggtcaccgctgtggcttcctgcacccccgccccgtagagagctgcagggagcccggggtgctgctgctcttctgaggcgggagggtctcctgcctttgctcaggttttatagagagagggtgggctggacagggacagacaggggctggcggctgagggtgagggtggagggagtggtgcggtgtcccggctacaggcgggctctagggctgggctgggtgagggcttgggcagggtgggtggaaggctcagaggggcctggggccagggcccggtgggtccttcgctgccctggttggggtggggtgggtcactgcagggaattacagcaagtgggaggctccaggaggtggggagtttcctccgacttttgggactctgaggctcggcctcctcttgcacgttctccagcctcctcgtcaccgccaccaggttactacctttacccgacgcacacctgacgtggctggatgactgggcccgggggctgctgccccttctcgcaccccgcccctcccctcccctcccctctcctctcccctcccctcccctcccctcccctctcctctcctcccctcccctctcctctcctcccctcccctcctctcccctcctctcccctcctctcttctcctctcctctccttctgtgcccgtctccagccctctcccgttctgcgcgcccctccttccccgacttgggcagaaccgcacgcagcggctcggaggccaggcgtgtgccgggcgggatcgcgcgcccgctggggtgaaatcaaaagaaaagcaacaaagccccttccgcggaaaatggggtggatgtgagcggcgccggcctcttcctgctggaatgggaattagcggcgaggattattttgaggacgcgaggtccctttgtgcccaaatgcgcctcctcctgcccggctcggtggggttcgcggcgcacggaccccgcccccaaggcctcaggtgggccgggggctccgggaggcctccgccgccctccgtcccaggagagcagttcccggtgagaagcccgggctctgcagacaccccacagcagttctgcgtctcggaaaacgcggcgccttcatcaggaccg

SEQ ID NO: 496 - DNA, 25933 bp, Homo sapiens
gattggcatcagacatcctaccagctgcaattgcatcatttttacctatcatctgcttttccttttgcgggggggtagggttgggctcttataaacgggtcaaagagacttcaacctcaaaaccaaggagaaatccctgcttgcagagaaacacaggaaatgactctttctctgtgaaaggcagtcaggaactctgctccggtgatgagggctaactgatggtgtgggagagtgatcaggaagagaatcttcctggaggtggcacaaagtcagcaagagcccaggaaatcacactcctgggatggctgctgtcaccaccatcaccctctcttctgtctcccctcggtgccatcaaattgagtgaggaacaagggaaagtaactacatgaagaaaaccaaagtgaacatgaatgtgggtgatgtgaatataaaaggagaaactaaaaatgatcaaaagtttctcccgccctgtggtggaaatctctgatccatgtcttcatgtgtctaacttccaaggagggggctaacagcacagacatggaacaaaaggcccatgttggctcagagatctaaacggtgggcccctctgagatggtaactgcaaccaaggtgtctgtgatgtccttggttactccacctcctgaccaggggtctagtttgccattgctgaaaatgatgtccatgtgcgaactcatgtttttgcctccacacaccgtagtgatccaggagggcctctgtctcacaccccactgtttaaaacagttatcagaaaactccttcaagttccacgagtgaagttcagacaaaaaacgctataaaaagttagatgcataaggatagctcaccactgcacgtcacccagtcttcagaggtctagtctttcaaatgtcgaatgtcaggaagccattgcaaactaccgtccatatttgagagtcgattaatggcatctcaggacctacggaggttctctgaacaatatggaccacctttcttaaaatctgtagttacgatcttcataaatacaccacaaggtaccaaatccttaaactgccagataagggcagaagttgcaagagctccaactaccatatgagggtatttcattctgaactaggctgcaagcatgccaccataggggccctagagggccgtgacagggtgattttcagctcctaggactgttcttttcaagtgtttgattagctctgcaaaatcagccagaccttgctctgatgtcaggagatccaagtgtccagaatccttgaatgggtcatcacagggcagggactctccgcagtatcgctgttccgcatacaccaacatagctttcagttcctcagccccatcccacatgaaccacgtattactgcagaaccagatgatgtccccgtcatatttctttcagtatttatttgctattagatactgctgttaaacagttttcacagtatgaaatccaaaatgatcaaccctctgttggaagtggagaaccgagttgttcttggcaacagccgggtgggacgtggagttggctggcgagtgcaggctgccgagagcccttaaggctggctggagggctgtggtggtccagggcaccaggaaagccaggagcaggagcaggagcaggaggcccatggctcaggctggtggctctggtgcaggtctaaagccatgttaaatcaatgttttctctatttaaaaagtaattttctagtttcgaggctgagtttaagagcagagtatttttctctgagtaagcccttagacaacaaagtatcaccagataaaagttaaacaaaagcaaactcaacagctgccttccacctagagccagggagggagtggacagcccctagactggggagaatatagggcagctttatggaaagcggggctgggaaatgtcttagatggcttgggctgctataacaaaataccatagactgagtggctttaacaacagaaatttatttctcatagttctagaggcggaagtccaagatgaaggttctggctgatgtggttcctggagagggactgcttcctggcttgcagatggccaccatctcactctgtccccgcatgcagaggacaggggatctggtgtctcttactcttcttataagaacactaataccatcctcatgacctcatctaaacctaattacctcctaaaggccccacctcctaatattatcccattgggaattagcgtttcaacatataaatttgagggggacacaaatatttagtctatagcaagggagaattccaccagcagatgttgggctgtgcacaaaaatagtccaggctgggccaggtgcagtggctcatgcctgtaatcccagcactttgggaggctgaggctggtggatcacctgagatcaggagttcaagaccagctgggccaacatggtgaaaccccatctctactaaaaatacaaaaaattagccgggcatggtggcaggtacctgtaattccagctactctggagactgaggcaggagaatcacttgaacccaggaggcaaagttgcagtaagccaagattgtgccattgcactccagcctgggcaacaagtgcaaaactccatctcaaaaaaaaaaaaaaaaagtccaggtttgggaggcccaagagctgcttcctctgcgagtctagctgggagcagtcatggctgtgatgaggagaagctgggcacttggggctggcccacacatgcacacataaaccacagtcagattgcatcactaacagccattcacacgcctttaattcagacctagcatttgaacctaaaatcaaactactgcactattacatgttgcaccatcttgtatacaaggagacttcaaaaagctcatggaaaactacaattaacagattaaaataaaaaatataaactttctcaatataggctccatcaagttcaagacacttttgtaagtgatattagccatctagtcaaccctcagagaactgagggtcctgggaatttaaccatgtcaatacagtcatttttacatttattaactgaagaaaaatgagtgccctttaagaattttttaagattaagatataaaatggggccaaatcaggactataaggtggatgcctaatgatttcccactgaaacactcaccaaattacccttgtttgatgagaggaatgagcaggagcattgttatgatggagaaggactctctagtgaagctttcctgggcatttttctactaaagctttagctaactttctcaaaacacattcaaaataagcatatactattgttctttggccctccagaaagtcaactgacaaaataccttgagcatcccaaaagactgttgccatgatccttgctcctgactggtccactgttgctttgactggaccacttccacttcttggtagccagtgcttagattgtgctttgtcttcaggatcatactgtaaagccacgttccatctcctgttacaattgttacaattcttcaaagaaatgcttcaggatcttgatccccttgtttaaaattttcattgaaaactctgcttttgtctgcagctgatttgggtgcaacagtttcagcagccatcagtggaaagttttctcaagtttaatttttcagtcagaattatgtaagctgaaccaattgagatgtgtatgatgttggatactttttctgttgttaatcattggtcctcctcaattagggcatggataagatgaattttttcctcaaaaattgatgtggatggtctgctgctgtgggcttcatcttccatatcatcttgttccttcttaaaatgagctatctgttcataaactgctgacttcttcggagtatcattcctataacgttttcataaagcatcaatgatttcaccgtccttcctacccaagaatcaccgtaaatttgatgtttgttcttgcttcagttttagcagaattcatgttgctctgataggggttcttttcaaaatgatgaaaccattcttagtgcctcaaactagatcccgttcagacacgttataacaagttagtacgagtttattttggtgcaaaaaatggaaaccatagtttccatttccgtttccaatgcatagttctttcattatatgcattttccatgagctttttgaagacccctcatatagcttgtggcctacagttaagttgagccactttaagggctagtctgaagaccaaaaggaagaagtcatgaaataaggcaacatttgattggatactcaggactcacaaggggaatttccctggcatcccctttgtcgtagtaaaaatagcaaaatataagacagcactaattactgcaacatgctaatgtatattcgaggatagataaacattgcaattttaaaagggtgacatagaatataagatttgtttcctttctcctagaagattgcagacccaaaaataaaattttagaaagtgctccagaagagttcctcgaattcaaggatagctttcatgatcacatatttaaaatatttattgaccacgtactatgttctggaccctgtggtagtttctgaggttatgtcactgaacaagacagacattgtctctaccttcaccatgcataatctagtggagaaggcaccaacacttgcacaatttatgctgtcatacaagtgctgtgaaggagaatgtgactgctatgagactgaaattgtcttcgttcgtttagtgttgctataacagaatatggactttgtcttaagtctgtttagtattgctataacagactacccagggctgagttatttataaagaagagagatttatttggttcacagttgcagtggctagaaagccagagggcttggcgctggcatctgcttggcttctggtgaggcttgtgttgcatcacaggatggaaaagaagcagaaggggaagcaggcatgtgcagagagacaaagcaagagaagcaacatggatttgtaacaacctattcttgcgagaactaatccattcctgagaaaactcacctgctctcttgagaaagacatcaattcatcttaatgacttagtcacctcttaaaggcaccatctcccaacattatgatattggcaattacatttcagcatgagttttgctggggactctcaaaccatagcaaacatcatggggtcctatgtaaatgggaatgtggtgtaggagtagggaatcagagataattttttaaataagtgatttaatggagattcaaaggataaagaagggttatctgaatgtagaggagaataaagaaggatactggggagcagaggaagcagcaagggcaaaggcctatgggcaaggagtgaaagaatgcccaaggggctggaatggcaggaacaaaagctaaccggggaagaactagtttacccagggtcttagaggccaagttaaagattttgttcccatcctggatgcaatagaaagtgcacccactggagtgtttgaaacagggggagtgacagttgttaggaataacgcttaaaatcttaaggaaattgaacactcgaacaaaggatttttagcaaagcaattttacttttgcgtagaggggtgcctctttggccagttgccatgagagcacacttgaacaaaggggcacaagagcctttacttttgacacaagtcttgcccctgtaccctctccccattggctggggtcgggttgtataatttaaactaatctcggttggctaaacatttgattttttttttttagaaagggtgggcacataaaagaaagtggagatgaaggggaaaaggggtgtctgtaatgagctagaaggttggtcttttttttaaataaggaaaggaacgcgagctggtattgataactcctggtattgtggcatgcttgggcatttaacaaaggcaaaaaggaagaaaggagaaaaaaaagagagggtactatgaattaaagaataaaatatcgatcagattattttaagagaaacctcatcatatcccacatactgaagggcaagaatgaatatgaggaaagtcgtcaggaggcaagagacaacaggggcctggactggggtgctggtcatgaagatggacagaaagagatggactcgtggtatgttttgaatatataatcaacaggacttagtaaagacttggacgtgggacatgaagaaggtgtcaaagatgactctccatgtggtgttcaacttgagcaactctacagatattgaccatttaccacaggggctttggaggaagggtgaatttggaggggaaatggtgagtccagttagaattccaaggatgactttggacaaaaaggagaggtctgatttgaaggtacacatttgggaatcaaatgaataggatccactaaggagagagcacagagaaatagaaagcccaggactgcaccccgaagaatgccaggatttataggttgggtgggggaggatgaggcagcaaaggaagctgtgtagtggtcactgaaacaggagacaaactaggagaagaggatgtttgtggcaagtgatggaagagaatattttaggaaggtgatgatcaacactattgaatgttgctgccaagctgagaaggaccaagatgtctctgttgttgttagcaattcccatgcccttccttgggtgaggcagattttctgggttgtgagatagaagatagtatgcagtgggttgaaatataactggaaagtgagaaaatgtgactttaatggggagaagaagtatggtgtggagctggagacaatggggcattgaaggacggatactaaagatggaagtgacttgattgggtttccactgctgattagaaggatctattatttgacaggaggagattcaagatagctccactgggaaggtcaaatgggatggatttagagccatctcttaaaggcgccatcgccctgggtttagagcccaggagtgaaaggctgactggacattctgtacttggggaatgtggtggggaggtgggtgggagttgttgactgttaacttctcagtagggtaatctggctgggccgtgtgctgggggacccctgacatcagtactttcaggtttctcttcctgggccatctaattcccctgaggagaagcttccagcatcttgcctagagggagaagatctgcctgcctacattctgagagatgagtgagaggaggggctgcccaccacagcttccagcagacataactcatttcattctcttgtgcttttaggagccttaccttccgttatacctaatgttctcagtcctgagactctctgctttctccacagacttcatctccagtctcctgatggggttggggagaagcagtggtggagtggggttggggaaactgcagagccaattgctttaccttcacttccagaagtgccttcttgagctgtttgcgcgtgctgtgatggaaatcacgttaagctcagctttctgcactgccagatttgtttttcatcagttttccaacttccagaacctccttgttcgctctcctgttccctcctgttctctctttactgtggtttggtaggacttcaggagaggtcagaattagatgcaggtattcaatctgccatctttatccagcagtcagtgtcaaagcctgtctcgattgtggaggaatatataagaaaggaaaaggccccagtgtcctgtcccttctgatgctgtgtggataccaacaccccaaacaatgccacccacccagctgtgtcaaaccaaaccaaccaaaacaatgagcacacatagatggcaaactgcagggtttgccgaggctcaggcaattcgtatttggaatttgccacatagatggcaaattgccgaggctcaggcaattcgtatttggaattattaatatatggacccaaagccttcaacccactacatcggccaccaaagacaaaatgagataaaattaggaacatgttcatcttcctactataatgattaataaaaggccctttaagttcagagaaatgatttcttctttttcgacgcctacgaagaaatttcattaaaaatattaacagaaatccaaataaaagagaaaaagaaccttatcgtaatcctatctgctcaacacgtggtttggtttgatttggtttgtttttttccaggttctcaaccagttgtggtccatagacattcataatttgacaaaaaggatctatgtcaactctgattagtttgtgaaagtgggcttttccccaaatccttccagtgcctaagctgggcccctttgggaagagcattaactgttttgggtcactagcacacagaacagtgttttaattgtctaaaaccagggataagagtataatcccctccttataaggcaccccgtggtcaggtgcttaagcacatgagggaggcagacaccgctctggggatgatttgcaggttggagagaacctggctccagatttttcctttcaatcagccacagggcctagcttccccccgagaagtctctttttggaagttgaagacattgtgtctcatagcagtactgacccggagggttaggaagaatcttcgaggccctctggccagcacccctgatgagtggctgtctgtcctctgctgcacacttccatggcttggaaactcactactggaaggctccagtgactttcggacacatatctgggactaactacagttgacacttgaataccatggaggttaggggcactgaacctcccccaccccttgcacagtcagaaatctctgtataacttttggctctccgaaaatataactactaatagcttgctgttgactggaagccttactgataacataaacagttgattggttagcacatattttgtacggtacacacacgcacacagacacacacacacacagagtattcttacaataaagtcagctagagaaaagaaaatgtttctaagaaaatcctaaggaagagaaaatatattaactatccattaagtggaagcagatcatcataaaggtcttcatcctcattttcttcacgttgagtaggctgaggaggaggagggattggtcttgctttctcggggtggcaaaggtggaagaaaatctgagcataagcaggcctgtacagttcaaacctgtgatgtttaagtgtcggttgtgattcattaagcccttagtccccctcccaccccccgcctttacagttttgagcagggagcatggccaagagaggccaggctggactgggcactgcagtggggattggggatacccagatggagcttgggttccgagtgggcttctggaaccaatcccccacagataccaaaggaacaacacacatgcatatacacacacgtgtatatgtatacttatatatacacacacatatatatccatatatacacatacatatatgcatgcatacacatacatacatatatacatacatatatacccacatatacacatacatatatatacacatacatatatacacatgcatatatgcacatacatgcctatacatatatgcccatacacatatgaacatacatgcccatacatatatacacatacacatatgcacattatatatacacatacatatatacccatatatacaaacacatatatgcatacatatacatacatatatacatacatacccatatatacacacatatatatgcatacatatacatacatatatacatacatatatacccatatatacccatacatatatacacatacctatatatacccatacatatctacacatacatatatacacccatacatatatacacatacatatatatacccatatacgtatatatgctacatcttatcatatattatatattttatataacataatatgtattatacccatatacacatatatatgtgttatgtattatacccatatacacatatatacgggtataatacatattatgcaatataaaatatatatatgcccatacatatatacacccatacatatatacccatacatatatacacatacatatatatacccatacatatatacacatacatatatatatccgtacatatatacccatacatatatacccatatatatacacatacatatatatacccatacatatatacacatacatatatatacccatatatattatatacacatacatatataatacccatatatacatatatattttatataacataatatgtattatacccatatacacatatgttatatacccatatacacatatatgggtataatacacatacacatatgttatatacccatatacacatatgttatatacctatatacacatatataggtataatacttagtatgttatataaaatatatatgtgtatatggatattatatatgtatgtgtatataatatatatgggtatatatatgtaggtgtatatggttatatgtatgggtatatatgtgtgggtatatatatgtatgtgtatatatgtatgggtgtatatatgtatgggtatatatgtatggctatataagtatgagtatatatttatgggtatatatgtatgtgtatatatgtatacatatacacatttattgtttatgcatacatatgtgtgcatatgtgtatgcatatacacgtgtatatgcatacatatatatgtatgtgtatatgtatgcatatacacatgtgtatgtatatgtatgcatatacacatgtgtatgtatatgtatgcatatacacatgtgtatgtatatgtatgtgtatatgggtttatatatgggtatatatatgtatgtgtatatatgtatacaaatacatacccatatatacccatacatatataggtgtatatatgtatatatatgtatatgtatatatgtatggtgtatatatatgtatgtgtatatatatgtatatgtatgcatatatgtatgtgtatatatgggtatatatgtacgtatatataatgtggatatatgcatgtgtatacatgtatgtgtgtatatacgtgtgtgtatgcatgtaaacacatatatacaagtgtaaatacacatatgtacacatgtgtattatacacataggtacacatgtgtataatacacatatatccacattatatgtgtgtctatatatgaacatatacgtgtatccagacagtgtgtacatatatgtgtgtatatgcatatacagtcatcacttggactcgtgggggattggttccagtagcctccgcccatgcctagatcccacaggatgaagtccctgatataaaatgttatagcatttgcatacaaactatgcacatcctcccaaatatcttaaatactttaaatgatctttagattatttataataccttatacaatgtaaatagttgttatactgtattgtttagagaataatgacaagaaaaatatctgtacatgttccatacagacactttttttttcaaacatttttgctccatggttggttgaatccaggcatgtggaacccatagatagagaggggctggccaggcgcagtggctcatgcctgtaaccccagcattttgggaggctgaggtgggcagatcacttgaggtcaggaattcgagaccagcctggccaacatggtgaaaccctgtctctactaaaaatacaaaaagttaactgtgtgtggtggcacgtgcctgtaataccggctactcagaggctgaggcaggagaactgcttgaactcgggaggcagaggttgcagtgagccgagaccatgcactgcaccccagcctggtgacaaagctacactccatctgaaaaaaaaaaaaaaaagatagagagggcctagtgagcacgtttgtgtgtatatggtctcaacatcagaacaacctcagatctagcattattcttactttggaaacaggttgagagtcagagaattgaacaactttcccaaggttttgtagcctgtaaatggcagaaccaggattgaatataaaatttctaaatccagagactttgttcctttctacactggcatccaaggtagtcctctgagacatatgtaactgctatgcttgaaacctgcatttccttccacatggcatcacactctccttagacactaggcttcacgtcacgtccagtttctaagatcctcacggttctatgtctgtttggcagcagggtcatctgagaaggcctgcagtgtgggccagcacttcacaaaccttcatgtgcgtgtgaagcctgtggtctgaatgcagattctgattcaggagtctggggtggggcctgggactctgcctttctcacaattgcccaggtgatgccacagctgctacgggtccccggaccactctttgagtagcaggggcggggcagtgtggcatctcactcttggttttgaatttcatctcagcacaatctggggtcacttatttaactaacgtaacttctctggggctcagaatcctcatctgtgaaatgggaacaataatatcagccccactgaggaatttaaatgaaaggagatgatacataacacagatcagcttctcacttgttttggttagaattggaggtgattccttcattgacataaaacacgaggctgttatccagacagagctgttaaactttgggttgggttccaaatcatttgggttataatgtcagctctccgcatcactccagaaaagtgatcttagtaagatccttctagtcattttggttgagacttgtttcaggtggtctagaaggcctatttatttatggctatagtttttttgtttgtttgtttgtttggagacgagtctcactctgtccatgctgaagtgtagtggcacaatctcagctcactgcaacctccacctcctggattcaaaagattcttatgcctcagcctcccgagtagctgggattacagctacccgccaccacactcagctaatttttatgtttttagtagagatggggtttcgccatgttggccaggctgttctcgaactcctgacctcaggtgatctgcccacctcaactctaccaaagtgctaggattccaggcgtgagccaccggcccggctgtggctatagttttaaatgctgcctagactccaaattgctgcacacaacctgtccccaagtccgtgtgtgcacatccattatctggggtttcagatgtctggggtttctatgtcttaggagttgccccctaagtgtgggagtccaaactttccctacgacagaactggaaaaaaacaaaagcaaaaacaaaagaaagctagttccacttttatccagagagaaccgaaagataggatcacatttcctcaaacttctagtaaagaagtcaggcacgggtctgggctctggagcctggagccagctgtagggccggccggtggcctggaaacaaacagtcccacataggccgggaggaatatgcgcgcactgcctgcctccattgttttctttcctggaatagctgcttgttctcatcagctagtgtggtcagcatttccattcaagatcatattgtcagggctttatttttaagtcaggcatgaaaatgggccttgagctgaaacttggaagctgggcaattagcatatttgaaaggaagccaactggtcttttgttattccgtggggcagaaggggcttttccatgctcttctaaatgacaaaaagggtttgtgtttggggcattttaaaacgaagcagtaggcatggacttggctgtttacacacagaagctcacaagaacattgtctctgggctgcctggatgatgtctgtaggggctgcgagaccccaaggatgttctctgctgaccagaggaactggagcactttaatgtagaaattggaagccaaggaactttgtgtttaaagtagaactgctggaagtggccaagtccacggctgctttccagaatgcccttaaagaaaatgctgacccgccaactggcaaatacgtcctgagtgccttctccccacgaggcactagtttggcagaaatttggagctgggctgggcagtgatatggaaagaagtatgcagtctaagtaggagggtcatctgtatctagagagataaaaacacaaggttagttaatgcctcttgctgcaagaggaaccagacgtgaaagggatagggaagcccaggaggggagggaccatgaaggattgagaaagattgctgcgtacgtgttaggggggtagggagggcaggtggaaagaacgatggctttggaacccctgactcactgtgtgacactggcaaatttctgggccttggggaagtaccagaaattataagaaaactaggaaaaatagtaccaggacagagctgctgtggaattgtttaatgagataatgcatgtcaagtgttcagcacatagcaaatggtaattaccgtgtttaaatgatgggtatattggtttttggagttaaataatctgagcaaacggatctggtcagaaatccttgaaggtccggggagccggtgggatgagtctggtgcactgattccatagcacaggggcaggaccctctgtaatccccccgccccccattttgtgcacactaaacacataattgctggctaagtttttcataatgtacataaacaggacaaacgtattttccctatatttcagatgtagagatcaatataagtagtggtgtcagatgaatcataggctgtcccaatggggcatatttttattaaaaattatttatactaaaaagttgttggtttttatctgaaattcaatttaaccgggtgtcctgtagagagagagagagtgtgtgtgtatgtgtgtttgtgcgtgtatgtgtgtgtgtgcatccacgcacgccctaagtctagagaccctattcctaacacctatgtacccaacactcagagttaataagtatcaatactttgctatcttaccttgagttttttaatgttttaaagagaaagttacagaccacagttggaatctccttgtcacacacataccaacatcattcttctccaaaaatgcccaaaattgattctattcgtgtgtatccttatgtggctgttctactttttctatatgtgtatgtttccagaaacaaaatacactcttgttttctgtgctttatagatttacataaatgatatcttagtgtatttttctttcagccatataattttattttaaacatgaaatttttgataaaaaatattatatgtgatatacacattgtcatcaccataatacagccaacgcctgtgcatccattacccagcagaagtgccgtccattacccagctgatgtgctgtccattacccagtggaagtgccgtccattacccagcagaagtagaacgtcgccaacgcttttgaagtctctgtgcctccttctgaattgcattccccctgaccccacatagaaggtaactgcctccatgagtggagtgcttattctttatatttctttgtatttatttattgatttttatttatttatttttgagacaggatctcactctgtcgcccaggctggagtgcagtggcacaagctctgcccactgcaccctcgacctcccaggctcaggcagtcctcccacctcagcctccccagcagctgggactacaggagtgtgccagcatacccggctaatttttgtatttcgtgtagacacagggtttcaccacgtttcccaggctggtcttgaattcctgggctcaagcgatccatctgcctcagcctcggcctcccagagtgctgggattacggatgtgagccaccgtgcctggcctttctttatagtttatcataatatatgtaattctgaatgacagtgctcagttttgagtgagtttaaaccatgaacggaagagaacattgtgctgtttatgttcttctggagctatgctctcttgacttcatatatttaagaggttcatttcgtgttggtgagtgtaactatggttcattgtttcttttcactgctgtttactattctattggataaacacactgcatcttgtattgctacgggacatttgagttgcttcaagtttttgctactacaaacacagctgttatgaacattattatacttttttctggtatatatatatatatatatatatatatatatatatatatatatataaaataatttgtctgtggtaaaaatacctgagtgggatctctgggtccttgtattattaccatcatttctcaaagtggttctacaagtttataccctcaccagagtcttgaccagtttctacctctaccagaagcgtataagtgtcttgggtgtttcacagtccctcccacacctgccaagctcctggggacaaaatgatgtcttgctatggcctaaattgtctttgccagattattaatgatattgatcatcttttcatataagtattggccactttcagctccttttctgtgaagagactgttccggtcatctgtttatttttctattgggtttgtcttttttcttatagatttgtaagaactcttcatatattcttgttactaaccctttgttggttacatatgttgaaaatattgacttttagtttgtggcctgccttttcattttttatgatatcttttgaggaagaaacagtcttaattttaatgttgtcaaatgtatcagtcatttgcttttctggttaccactttgggtgttaagaaaatttccttctttccttccttccttccttccttccttccttccttccttccttccttccttccttccttcctttcttctttcttttccttccttccttccttccttcctttcttctttcttttccttctttccttcctttctttctttccttctttctttttcaaggtcttactctatcacccaggctggagtgcagtggcacaaccacggctcgctgtaggctccaactcctgggctcaagtgatcctcctgcctcagcctcctgagcagctgggactacaggcatgtgccaccatgcctagccaattttaaaattttttcgtagagataaattgtttttgctatgtagcccaggcttgtcttgaactcctagccttaagcaatctccctggcttggcctcccaaagtgttgagattacaggagtgagccacagtacccagccaagaaaactttctttatgctggcattataaaaatattcttttatatttttctcttagagttataaaggtcagctttgttatttaagcatttaatctacctgaaattgattgttgtatatggagtaaggcagtgatccagttctgttcttttaccttatggataaccaattgttccagtgtcatttactgggaagtctatctttttcatcgatctacagtgccattcttttccatacatgcatggctttatttctaggtttcttttgttccatcagtctgtctgtctatccctgagagttccatactgtcttaatgactatagctttataacaagttttaatgtctggagaaacaagagttactaacttcttcacagcatcttatctattctcagtttttaacttacaatataatttttgatgcaacaaacttttataggatttgtctatgtaagtatatattatttgtcattaatttaactgccatttatttgtatttacattatacatatgtattccatttataaatgccacagttgactgtccattgccccactaatggacattaagtggtttcccactttttccttagcacctattagaggaattgttggattatagagtatgtgcatcttcaaatttactatataatgcaaaattgctttccaaagtgtttaaaccagttacactcccaccagctgcgtaagaattgaagttaatctgtctctgctgaaacactttttatttttttaaaaaaaggaaggatgtgcaatgttatctcagtgatgttatattttcctctttccatatgcgtttttcatatgtgtttattagctatttaatttcctgttcatatcatttgctcatcttcctgttggattgtctctattcttactgatttgctcataagtcattttatattctaattactaaacctttgttgtttatagtggttgaaattatcttctcgaatactgtggatcaggggttggcaaactatggtccttgtttatggcctatttttgcacatcccaaactaattttaatgtaatctaatgtctttacatttttaaagattgcaaagaaagaagaaagcagcagcagcagcagtggcaacagagatgcatgtggcctgcaaagccgaaaatatttatcatctggctattcacaaaaaattgctaaccaccccccgcaacccgctatgactgttttctaacttagtttctatttttgttgtcattgaaatgtttcatttcaatgtagtataatgtatcattttaaagattataatattatagattatatgactctgcttctagctctctgatttcattgttctattcatatatcaaaatgccaataccacttttaaatttactagtgttccaaaataagtctgatatctggtagggcaaatctgtccccttccaacccattttctctcttaaacagttctgatccaacaacctccccacttggtcacaatgaccaaagttgattcaatgcatgcattaattttatatttatacctttcaactgccagtatataaaattcaaagttgtttccgcccctaccccccgccagctgattattgttattgctattcctgaaagggggtatttttcaatccatggcacttgtgtgcattagcaataattagataactttgctcaaaaaatccaactcattttgaagacatctgtttgactttctttgcccttctgctggcttctggtgcaggagctgagctcttaattaattattgcttatatcgggtagtaataccccctgaaaagtgaagcaagcttgcgctaaaggaagcatagaaaacagtacatttctgtaaacagacgacaatgtttactgaatgcttatttctttaaatgtcattgggtatataaaaccaagcttcttggagttctatccactaaactcaccgaatcattccaaattctaacttaatttcagcagtagagatgattcatagcaaagcagaaccaaatgggctgcagttggatttttaggtttctgtagttcgtgttttcaagtttttaaacagctttattaataaatttctttatttgtttgtctgtttatcgggcagactcccaagccagaataggctcagggagactccttaaacagctttactaaggcataatctaccgacttttaaattcgctcattgtaagtgttcaattcaatgatttttcacaaatttacagagttgtgcagctatcaccatgacccagttctagatcattccctttaacccaaaaagttccttcagactggtttgtagtcaattctccccaccccttggcaattgctaatctgctctctgtctctgtcaatttaccctttctggatatttaatataaatggaatcatacaatatgtagcctttgtgtctggcttctttcactctgttttagcagactatttttgaggttcatctatgtatcagtagttttttttcttcctttttattgctgaaaagtgttgaagtcaaataaaatatagagagatgaatttcttttctttttttcttttcttttttttttgagacagagtctcactgtgtcgcctaggctggtgtgcagtggagcaatctcggctcactgcaagctccgccttccaggtttacaccattctcctgcctcagcctcccgagtagctgggactacaggcgtccgccaccacgcttggctaattttttgtatttttagtagagacagggtttcactgtgttagccaggatggtctcaatctcctgacctcgtgatccgcccgcctcagcctcccaaagtgctgggattacaggcatgagcccggccctcgaatttctaaaagtagcattttctttgggaagaaagaattgcaatttgagacatacgcacaaactgggttgtctttggtatgtccagagaacaagaagtttagaggttttattttttaaaaagagatatgttacgtgttgctctttgagaaagttcattggctctactaaggtttcagggagctggcaagctctaaccggtaagtgatggtagtgggtaaaactagtcttagaattgcagcaagttatttcagcagctgtagataaaactggtttcagtttacagcaggcggttttagcaactgggcttgcagagaattacagttttggagagatggtatgtgtccccagggcttttccctcctggtttctcaactctgttttagttgagtacgacaagactttcacaagagtatttcactgtgtgcataagacacactttgtttattcatttaccaattaacagacacttgggttctttctagtattgagctgttatgaatgatactgctctgagtatttgcaaacatgtctatgtgtggacatgtgctttcatttatcttaggtagattactaggagtggaattgctgaatcaagcggttaagtttaactttctaagaaaatgccagacttgtctaaagtggctgcattcttttaaatcttcatcggcaacatgtgatggttaaaatttctccatatgctcatcacacttggtattgtctgttttttgatgatagccatcccagtgagcgtgtagttgtagctcagcatggttttaatttgcatttccctagtaactaatgttgttgaacatcttttcaagagctttttagccatttgtataattttttggtgaaatgtctattcaattcttttgaccatttttatattcggttatttgttttcttatcaatatatgtttggagaactctttatataatttgtatataagtcctttatcagatttgcaaacattttctctgagtatttggcttatctttttattttcttagtggtattttttaaagcatgaatgttttcaattttgatggggtctaatttataaatttttttcttgtatggatcttacttttggtgtcactcataaaaatatatagcctaatctaaggtcagaaaaaattgtcttctatgttttcttctacaagttgaataattttatctcttacatttatgtctatgatccattgtggattaatttttctgtttatgctgtgaaatgagagcctaagttctttctctttttttttttttggcacgtggttattaaattgtcccagcaatgttttttgaaaagataaccctttcatcattgaactgagttttctggaatctttttagaaaatcagttggttgtaaatgtgagggtttgtttctagacttataattccactccactgatctatatatctatccttgtgctaataccatatagtcttaaaaagtgtagttttagagtaagtttcatattgagtaatgtcagtccctaatttgttctcttttaaaaaattgtttggctactccagatcctttgcatttttatatagatatttttaaattaggttatcaattctcacaaaaaaagcttcctgggtgtttgatagggattgtgttaggttaataaatcaatttgggggagaactgccatcatgataatattgaaatccatgtgcacttgggatatctctccatttatttagcttgtttttaatttttctcaacaatgttttgtagttttccacgtatgagtcttgtattttctttactaatttattcctattttattctctgtgaggctattatgaacagaattattttcttaattttatttttaattttcattgctagcatataaaattacaacatttcttttatactgatcttgtgtcagacaaccttgctaaacttgtttatttgttcttattagttttaggaggattctttggcattttctacatacatgactctcaaaaatcatctcttctgagaataaatccagttttacttattcctttccaatctgaatgaccttgttattatcgttttgtttttattgttgttgttattgttttgtttttgactattttcctggctaaaacctccagtacaatgtttaaaaaagtgacaagagccgggtgtggtggctcatgcttgtaatcccagctactcgggaggctgagacaggagaatcacttgaacctgggaggcggaggctgtggtgagctgagatcacaccattgcactccagtctgggcaacaagagtgaaactccgtctcaaaaaataaataaataaataaataaatataaattaattaattaataaaaaataaaaagtgacaagaatagacatttctaccttgttcttgattttaggggggaaagcattaatttttccactagccagtataacgttagctatgggtttttcatagatgctctctatccagttgtggaatttgccttctgttcctaatttattgagagtgtttttcataagagggtgtgagttttgtgtgtgtgtgtgtgtcaagtgtttttctgcatttattgagataatcatgtgaattttgttatttattctattaatatgctgtatcatataattgattttcaaatgttaaacctaccttgcattcctgggataaatctcactttgtcatatcgtagcatcctttttatattactggattcattttgctattataatatcttattaaagaataatgcatctatgaacattagagaaattggtttatagctttttcttaaaatgcatttatctggctttgatatcagggtaacactggccttcaaataaattgggaagtgtagctattctttgaaagagtttgtgaagggttgatattacatcttctttaattattacatagaattcaccagtgaagccatcaagttctgaagtttctctgtggaaagttttaagctaattcaatttctctacttcttagagctctattcagattttctatttcttcttaagttttgatattttttgtctttctaaatatttgtccattttttggtctaattagttggcataaagttgttcgtaataacccttataatctttttcatttctgtaggatcagtaatgatgtcctctttctcattcttgattttggaaatttgtgtcttctttcttttttcttcaccggtctagttaagcatttcttaagttcattgttctattcaaagactaattttcgtttcattgatttttctctggtttttctgttttctgtttcattgatttctcttgtaatctttattccttcctttcttctatttgctttggacttagattagtcttctttttctatcttcttaatgtataaagtgggttattgatttggggtcttttctgttacaggcatttaagcactcctttagctgaatcctatacatttttatatgttgcgttttcatttacatttagcttaatgtattttctaatttccctagtgatatcttctttgacccatgagttatatgaaaatgtgttgtttaattttcaagtatcatgggatttcccagatttacttctttcactggtttctaaattaattccataatagccacagagcctactttatataattaatctatttaaatatactgagacttgttttgtggcctaacatatggtctaagggaatgtttcatatacacttgaaaaaaaatgtatattctgtagtcagagtgatgagtatatgtcagttagattgaattggttagcagtgttgtttaattctatatcctttttgattgtatatctagtttttctatcaattattgagaggtagtaatgaaatattcaagtattttatggatttatttagtttaacttcaattctgtcagtttttactttatatattttgaagctttgtttttaggtatgtataaattcgaaattgttatacttcctgttgcattgaccctattatcattaggaaatattcttatatgtctccggtaatatgtcttgtagtcaagtctattttgtctgatgttaatatagccacttgagctctcttatggatgctgtttcatatgtcctttcccattattttacttctagtctctttgcatattcaagtctgtgtcttctatctcttgtagacaagatgtagttggatcttggtctttgcttttttggtttttgttgttgttgttgtttgtttgtttttttgagatagggtctcactctatcacccaggctggagtgcaatggcctgaacatggctcactgcagccttgccctcctgggctcaagtgatccttctgcctcagcctcctgagtagctggtaccataggcacccgccaccatgccctgctaattcttaaaaaattttttgtggagatgaggtcttgccatgttgccgaggctgatctcaaatcctggacagaagcgatcctcctgtttcagcctcccaaagtcctgggattacaggtatgaaccaccacacctggctggatcttagttttgtgaaaaggaaataaaatcttgggaccccaaactcattacgccaaagggaaagttaagcttgggaactaagtcacataaaaactgccttccttttcttttcagatagctgaaatttcacatgcttgctttatcttatgtaaaatgtacatgaacgcataaactactttccccgcactcctctcttttcacatgtcaaatgtggattcagtgaatgctaatcaaagcctcacaagcatctccctttctttgttttttttttttttcttccttcctcctttccctccttcccactctttcccctttaaatgtcaaagtcctcaaagccctgtttggaagaagcacaggccataggtcctactttaacttgtgtttttttttccgaggcacatcctcaaccttggcaagactgacttctaaatcaattaagatctgtctcagacactttttgatttacagttttcactccaatatgataatgtctgccttttgattacagggtttagacttgacacaggctttgcttaagaacctcaaattaataaaatttctgctggtgtatctgtgagtgggcaggggacacattaaaaattcaggtcatttttaagcagttttcaagcttttactttttacctgcattccctctgtgtcttgtgtacagcctcatggttgaccatgagtgtgtggctaccttgtgatgtcttcagtctcttctgcacaaacacacagataaccagaaatatgcttgccccaatcagaaaggcaatctcaggctactaaagccaccccttgcccactgccaagatggtcatttccagaccatcttggatgtgggtgtcctccactgctccaaatgaggcaagcccctttcatggtggcagtgaagctgctggaccacatggtccacctgccctggcagaacattcccttcacctctctggggaggggaaatggaagcagccccaggcaagaatgccacagaatcccactgttagtagtttttttgtgcacaaatgcttcttagattgttagattcctttgatcaatttgcagggtactgaaattgttgtttctgccaattttgttcagttttatagttgctttttgagaagaggattttttgacctcttcacttggctgtagccagaaatctcactaacagaggctgggggcactgaaacccatctccttcaggacaattggaagcttcagtattgaatgaggccttttagatcccaaaggctgctctcacctcacttattatagagcagagttgcacaataccagtttgtttgtgatgccattctaaggaagcttagttaatgaaatggtaaaagaccttcaccaaggggcatttttctcaacacagcaatcctcagtggagacttgtaggtggtgttccaatgtattagtagatatatttttgtgttttaacattcatgacttgaa

SEQ ID NO: 497 - DNA, 13879 bp, Homo sapiens
ctcagcctcgcaaagtgctggaattacaggcatgagccaccactctctgccttatctgtattttatgtatttatttttttgacatggagtcttgctccggcccagactggagtgcagtggtgtgatctcaccttaatgcaacctctgcctcccgggtccaagcgattctcccacctcagcctcccaagtacctgggactacaggtgagtgccaccacacccagctaatttttgtatttttagtagagatggggttttgccattttggccaggctggtctcaaactcctgacctcaagggattacccacctcagcctcccaaagtgctgggattacaagtgtgagccaccgtgcctggccccttgtctgtattttttaatataacatcctagtggatgtgaggttggatctcattatggttgatttgcattttcctaataaataattatgtttttatatgctttagataaatgttttgataggcagaacaataagctcccaaagatgttcacctcctaatccctagaacctgtgaatatgttaccttatatggcaaaagatacattgcagatgtgattaaggatcttgaaatggggagattatcctggattattgaggggggcaatatagtcaaaggagttcttaaaaataaaagaggatgcaggagaatcagtgaagaaaatatgacaagggatgaaaaggaaatgtgaagcaggggtgatagagaaagatttgaagatggaggaagtgctagccgggcacagtggctagcgggcggaccacctgaggtcaagagtttgagaccagcctggccaacatggtgaaaccccgtctctactaaaaatacaaaaattagccgggcggtggcacacgcctgtaatcccaactactcgggaaggtgaggcaggagaattgcttgaacccaggaggcagaggttgcagtgagcagagatctcgccattgcactccagcatgggcaacaaaagcgaaactccatctcaagaaaaaaaaaagaagaaaaagtggccgggcgcggtggctcacgcctgtaagcacagcactttgggaggccgaggcgggcagatcacgaggtcaggagatcgagaccacagtgaaaccccgtctctattaaaaatacaaaaaattagccgggcgtggtggcaggcgcctgtagtcccagctatttgggaggctgaggcaggagaatggcgtgaacctgggaggcggagcttgcagtgagccgagatcacgccattgcactccagcctgggtgacagagcgagactccgcctcaaaaaaaaaaaaaaagaaaagaaaaagaaaaagatggaggaaatggccacataccaaggaatgcaggccacctgtagaagcttaaaaaggcaaggaaaacagattctccacaaggaaggcagccctgctgacaccttgatattagcctgatgagaattctgccctacagaactgtaagacattttgtggtgttgtttcaagccagtaaatgtatggtaatttgttagagcagcaatcagaaattaatacagattttaagcatcttttcattgtgcttattggccatttgtgcatgtgtatatacatatatatatataaatacattgtgtgtgtgtatatatgtatatatatatatatatgagacagagtcttgctctgtcacccaggctggagtacagtggcacgatctcagctcactgcaacctcccctccctgggttcaaggaattccccctgcgtcagcctcctgagtagctgggatcacaggcatgcgccaccacaccagctaatttttgtatttgtagcagagatggggcttcaccatgttggccaggctggtcttgaactcctgacctcagatgatctgcccacctcagcctcccaaagtgctggggttacaggcgtgagccaccgcacccagccaattttgagctaacttttaaaaaattatttatttgtcgccaggttggagtgcagtggtgcaatctcggctcactgcaagctctgcctcccgggttcatgccattctcctgcctcagcctcccgagtagctgggtctacagccacccgccaccacacctggctaattttttgtatttttagtagagatggggtttcactgtgttagccaggatagtctcaatctcctgaccttgtgatctgcctgcctcggcctcctgaagtgctgggattacaggcatgagccaccgcgcccagcctttttttttggagatggagtcttgctctattgcccaggctggagtgcaatggcgcgatctcagctcactgcaacctccgcctcctaggttcaagcaattctcctgtgtcagcctcctgagtagttgggattacaggcgcgcaccaccatgcctggctaatttttgtatttttggtagagacagggtttcaccatgttggtcaggctggtctcaaactccggacctcgtgatccacctgcttcggcctcccaaagtgctgggattacaggcgtaagctactgcacccggccctgaatgcctattttttcttgcctaattgccgtggctagaacttctaatatgatattgaatagaaggagcaagagcagacgctcttgttttgttcctgatcttaggtggaaggtattcagtctttcaccattaaatatgattttagctgtcttctgggctctcttgtttctgatgagaagtcaactcttaatcttattggagtttccttataggtgacaggtcatttttctatttgtgcttgcaagatattctctttggatttcaagatttttgaccatgatgtgcctgagtgttttgtcctgtctaaccatggctggaatctctcaaaaatgagcagtaagggagttcccacaagggagtggctgaaattgaggagagaggccatttctcctactgtcccctgtctccaaagaaaaggaggaagtaaaaactgaaaaataacagactgatcggcaccactggccaggcctgtaggttaaagattaacccacaacctaaccgcttgtgatatctatatatcacagacaatggtatggagaaacacttgccttgctcaccacccccacctagtcatgtaccccatgcttgttcaatctatcacgaccctttcacgtggaccccttagagttgtaagcccttaaaagggccaggaactctttcttaggggggcttcgttcttgagacgcatgtctgccaacgctcctgaccaaataaagcctcttccttacatttcttggttccctgaccgggaagcgaggtgattaacgatggtcgaggcagccccttaggcggcttaggcctgccctgcggagcatccctgcaggggactccggccagtttgagcaacgcggatcctgagagcactcccgggtaggcatttgccctcgtggaacacctcgtcagagcggtgcatggcaggcccccacagaggatcaatgcagcggctgaacaccaggaaggaactggcacttggagtctggacatctggaatatggtaggaccagtcctgggaacttacccactccatttgagtggaagcgtggcctgatcacccacagtgtgcccttatcggcactttggtctcagttttgattatgatttggcttggcttgtttgaaaaaaaggaaagtgaaagtgagtgaatgcttgttttagacgggcacaggatggacagtggtcgccatccaaagtgagcgttgagccccaagctgcagttccgtaggatacctcacatggctaagtggcagttcgtgctggcgcctggtaccagcctgcttaagctaagagtatctgagattcccgcgagggaagcggccagtgactgccgaggagagtgggtgacccctttaccctttcccttcttgtgtcgtgagtgccatttttgtcttgggtgggggtggagatgggtgagacgcaaagtaagaccactccattaggaactatgttaaagaatttcaaaaaaggttttaatggagattatggggttactatgaccccaggaaaacttaggacctaagtgagatagattagccagcattagaagtgggttggccatcagaaggaggcctagacaggtcctttgtttcaaaggtatggcacaaggtaactggtaagccagaaaacccagaccactttccatacatagacacttggttacagctggttttagaccccctacagtggttaagaggacaggcagcagcagtactagtggcaaagggacagacagccaaggaagaatcccgcttcacccactgagggaagtcggcgcctaaagtcctgtccgacccaacatcaaaggattcatggcaagaaacagtgccagtggcccctcctttcaccaagaaagaaggcctcccactcctgaggccactgtgcccaagcttccacaaggcctacatacccctaggccacctagagtagaaaagaaaggatgcaagacctcaggagaaactcctcacttggtagcccatttgaggcctaaaactgggatacaaatgcccctgagagagcaacggtatactggggtaaacgaggacgggcatatggtggaaaggcgtgcctttgtgtaccaaccctccacctctgccaatctcctcaattggaaaaacaataccccatcctatactgaaaagcctcaggctataattgatttgctccaaactattatccagacccacaaccctacttgggctgattgccaccagttgctcatgtgcctgtttaacacggatgaacggcgaagggtgctccaagcagcgactaagtggctagaggaacatgttccggctgattacaaaaacccccaagagtatgtgatggcccagttaccaggaacagacccccagtgggacccaaatgaaagacagggtatgcaaaggctaaactggtagagggaagccctcctggaagggttaaagaaaggagctcagaaggccaccaatataaataaaatatctgaggttattcaaggaaaggaagagagtccagcacaattttacgagagactatgtgaggcctattgtatgtatactccctttgatcccaacaaccctgaaaaccagcgcatgattaacatggctttagttagtcaaagtgcagaagacattagaagaaaactacataagcaggctgggtttgcaggcatgaacacttcacagttattggagatagccaaccaggtgtttgtgaatagagatgctgtaagccgcagagagaactgcagagagagcgaacgccaagcccagcgaaacgccgacctgctagccacagcaatagaggggtcccccccgaaggggcgagaaaggggggccccaggaaaaatacccagtccggccatccacgcttgcagcgtaaccagtgtgcttactgtaaggaaatgggatgttggaaggacaagtgcccccagttgaaagggaaacaaggtgactgagcaggaggcctcagacaaggacgaaagggccttgtttaatctggcagaagggttactggactgagggggactaggctcatgtgcacccaaagagcccatggtcagaatgacagtcgggggcaaggacattgagtttcttgtcgatactggtgctgaacatccagtagtaaccaccctggtcgcccccttatccaaaaagactattgatataatcagaaccacgggggtttcggcaaagcaagctttctgtttgccctggacctgcactgtcgggggacatgaggtaattcaccagttcctgtacatgcctgactgccccttgcctttactgggaagggacctacttagcaagctgagagccactatctcttttacaaagcatggctctttacagctaaagttacctggaaagggagtcatcatggcccttatggttcctcgggaggaggaatggagactcttcttagctgagccaggccaagagataggaccagctctggctaagcggtggccaagggtgtgggaggaagacaacccgccagggttggcaatcaaccaggcccccatactaatagaagttaagcctggggcccagctggtcaggcaaaagcagtacctggtccccagagaagcccttgagggcatccgggtccatctcaagcatctgagggcctttggaattatagtcctttgtcagtctccatggaacactcccctcctacctgttcccaagctgaggaccaaggactacaggccagtacaggatttgcatatggtcaaccaagcaaagtgactttgcatccaacccatacacattgttggggttgctgccagctgaggacagctggttcacctgcttggacctaaaaaatgctttctttagcatcagactatctcctgagagccaaaaactgtttgcctttcagtgggaggatctggagtcagctgtcaccactcagtacacttggacccggctcccccaagggttcaagaactcccccaccatcttcagggaggcactggctcgagacctccagaaaattcccaccagagacctaggcttcgtgctgctccagtacgttgacaacttcctgctgggacaccccatggcagtcatgtgtgccaagggaatggataccctgctctggcacctggaggactataggtataaggtgtccaagaaggaagctcagatctgcagatagcaggtatgttacctgggatttactatccgacagggagagcacagcctgggatcagaaagaaagcaagtcatctgcaacctgctggagcctaagaccagaaggcaggtgagagaattcttaggagctgtagggttctgcagattgtggatcccaaactttgcagtattggctaagcccctgtacggagtcacaaagtgaggagacacagaacttttcaaatgggggtcccaacagcaatgagcttttcatgagttaaaagagaaactcatgtcggccccagccctggggctacctgacctaacaaaacctttcacactgtatgtgtcagagagagaaaaaatggccattggagttttaatccagatggtggggccctggccaagaccggtagcctacctctccaaagagctagatggagtttctaaggcaaggtctgaaagatgcgagatgtagaagtaccagcctaacaacttttcaagtgactcttggcctaggtgggtggtctcatgcacagccagtatgactgcggctcctagcagttgtggcatggctattcttccatccgacaactggatccatccctcttctatcacctgccctccctctgcctggagaaagtccaggcaggatgaattgctggtgaattatctcatgccccctgacagtgcaggtctggggcaaacagaaagcttgctttgccgaaacccccgtggctccaattatatcaatagtctttttggataagggggcgactggggtggttactactgaatgttcagcaccagtatcgacaagaattatctgtcgataattgagcctggcccctgtgcttaagagccttggcagcaactgccctgctagcactagaggcagataagctacctcttgccctaactttatgtttagggcaaaacctaaacataaaggccccctagctgggcacggtggttcacgcttgtaataccagcactttgggaggctgaggcgggcgggtcatgaggtcaggagatcgagatcatcctggctaacacggtgaaaccccatctctactaaaaatacagaaaaattagccgggcatggtggcgggcgcctgtagtcccagctactcgggaggctgaggcaggagaatggcgtgatcccgggaggcagagcttgcagtgagccaagatcgcaccactgcactccagcctgggcaacagagtgagactccatctcaaaaaaaagaaaaaacataaaggcctccccatgctgtggtaacactaatgaacaccaaaggacgtaactggctaacgaatgctagactaactaggtaccaaagcttgctctgtgagaatccccgcataaccattgaagtttgcaacaccctgaaccccgccaccttgctcctggtatcagagagccaagttgaacataactgtgtagaggtgttgcagtcagtttattctagcaggcccgacctccgagaccatccttggacaacagtagactgggagctgtacgtggacgggagcagctttgtcgacccacaagaagagaggtgtgtaggatatggtaatcctggatgctgtcattgaagccaaatcgttgccccagggcacttcagcccgcaagaccaaactcattgctttaattctggcctttgagctaagtgaaggtaagactgtaaacatttacactgactcttggtatgcctttttaactctccaactgcgtggggcattctacaaggaaaaagccctgttgaacgctgggagaaaagacataaagtatcagcaagagatcctgcaattattagaggcagtgtggaagccccaaaaggtggctcatgcactgcagaggacaccagcgagcttctacctcgattgccttggggaacccccaagctgactcagaggctcgaaaagcagcatccaccccctaccaggcatcagtcacagccccctgctccctcaggcacctgaccttgtacctacttattctaaagagaaggactttctccaggcagagggagggcaggtgatagaagagggatggatccagttatcggatggaagaatagctgtgccacaactgctaggagccgcagtcatactggctgtgcatgagaccacccacctaggccaagagtcacttgaaaagttgttaggctggtacttctacatcttgcatctttcagcccttgccaaaacagtggcgcagcagtgtgtcaccttctggcagcacaatgctaggcaaggtctaaccatccccgccagcatacaagcttatggagcagccccttttgaagatctccaagtagacttcaccaagatgcccaaatgtggaggtaacaagtatttgctagttctagtgtgtacatactctgggtgggtggaggcctatccaacacggaccgagaaagctcgtgaagtaacccatgtgcttctccgagatctcatccctaggtttggactgcccttacaaatcagctcagacaacgggccggcatttgtggctgacttgttacagaagacagcaaaggtattggggatcacatggaaactacataccacctactgaccacaaagttccggaaaggtgaagcagatgaatcgcactatcggaaatagtttagggaaagtgtgtcaagaaacaggattaaagtgggtacaagctctccctatggtattatttaagattagatgtaccccttctagaagaacaggatattccccttatgaaatattatatcataggccccctcccatactacggggactcccaggcactcctcgagagctaggtgaaattgcgttacagcgacagctacaggctttagggaaaattacacaatttcagcctgggtaaatgagaggtgccccggcagcttattctccccagttcaccctttctccccaggtgatcaggtgtggatcaaggattggaacataggctccttgcggccacggtggaaaggaccccagaccatcatcttgaccactcccacagccgtaaagatagagggaatcccagcctggatccaacacagccaggtaaaacctgcagcacctgagacctgggaggtgagaccaagcctagataacccctgcaaagtgactctgaagaagatgacaagccctgctccagtcacactcagaagctgactggtccacgcatggccaaagcatgagaaaactcatcgtgggactcattttccttaaattttggacttgtacagtaaggacttcagctgaccttcctcagactgagaactgttcccagtcactaaggtaggacaaaatcaagtcactaaggtaggacaaaaggttgctgcagtcctattattttatagttagtatgagtgtactgggactctaaaaggaacttgtttgtataatgctactctatacaaggtatgtagcccaggaagtgaccagtctgatgtgtactataacccatctgagcccccctatgactactgtttttgaaataagatcgaggactggcagctggggaaaagctgatactagtaaagtaataactagaacagaagagaaaggagtccccaaacaaattatcttaaaatttgatgcctgtgcagcaatcaacagtgacccatatggaaatagaataagatgtggctctctagattgggaaaggggctatatagtagaaaataagtatgtttgtcatgaattaggactgtgaagtgatgaatgtagttactggtcctgtgtcatttaggccacctggaaaaaaagatgagaaggaccctgtccgccttcaaaaaggaaagagtaactcttcctgcactagtggtcactgtaacccattgaactactaattaccaatccccttgatccctgctggaaaacaggagagtatgtaactctaggaatcgatggaactggactggatccctgagtaaatattttagtccaaggggaggtccacaagcgatcttccaaaccagtgtttcagaccttttatgatgagctgaatctgccagcaccagagcttccacaaaaaaggacaaagaacttgtttctccagttagcagaatatgtagctcattccctcaatgttacttcctgttatgtatgtgagggaaccactatgggagactgatggccttgggaaacccaagaattagtgcctactgatccagttcctgacataattccagtccagaaggcccaaactagcaacttttgggtcttgaaaacctctattaatggacaatactgcatacctagaaaaggaaaagacttcaccatccctgtaggaaggctcaattgtctaggacagaagctgtataaaagcataacagggacacagggacagtcacctggtggggtctaaaccatactgaaaataatcccttcagtaaatttcctaaattacagactgcttaggcccatccacaatctcatcaagactggatggctcccgctggactatactggatatgtaggcacagagcctacactcagttacctgatcaatgggcaggtagttgtgtcattggcaccattaagccatcctttttcctactgcccataaaaacaggtgacctcctaggtttccctgtctatgcctcccaagaaaagaggagcatagctatagcaaattggaaagatgatgagtggtgccccgaaaggatcatacagtactataggcctgccacatgggcacaagacgactcatagggataccatacccccatctacatgctcaactggatcatacggttacaggccatcttagaaataatcactagtgaaactggcagagctttaactcttttagcccagcaggaaacccaaatgagaaatgccatctatcagaatagattggccttagactatttgctggcagctgaaggaggagtctgtgaaaaattcaacttgaccaagtgctgtctgcaaagagatgatcaaggacaagtagtcaaaaatatagttagagacatgacaaagctggcacatgtacccatgcaggtttggcataggtttgatcctggatccctgtttggaaaatggcttccagctctaggaggatttaaaactcttataataggaatgataatggtgttaggaacctgcatgttactcccctgtatgttacccatatttctccagttactaagaagcttcgttatcaccttagttcatcaaaagacctcagcacaagtatactacatgaatcactattgatctgtctcacaggaagatctagatagtgaggatgataatgagaactcccactagtgagtgaggttctcaaaggggggaatgaggagagaggccatttctcctactgtcccctatctccaaagaaaaggaggaagtaaaaactgaaaaaataacagactgatcagcaccactggccaggcccgtaggttaaagattaacccacaccctaaccgcttgtgctgtctatagatcacagacaatggtatggagaaacacttgccttgctcaccacccccacctagccatgtaccccatgcttgttcaatctatcacgaccctttcatgtggaccccttagagctgtaagcccttaaaagggccaagaactctttctctgggactcagttcttgagacgcaagcctgccgatgctcctggccgaataaagcctcttccttctttaacccagtgtctgaggggttctgtctgcggctcgtcctgctacaaaatgatcctgagatgggatgagttgggattccaaaaacagaagcactaaatgccagggcgataagcccaaaatgcatattgggggaatttacatacagagtgctgcagagacagatcgcttgtggacctccccttggactaaaatatttactcagggatccagtccagttccatcgattcctagagacagcactctgtccttatgagggacaatgagagaaaaggggtgttctacttaggtatgtccacagccaaagggtcacggtatggagtttatatgaggctttaaggaatttgttcagggctagggtcagtttctttcagtgcttgggcaacaacccagatacctttatcagtgcctgggaatgttcaaggccttggtttgggttcaagcctgctgagaaaaacctgcagctcgctgggtggaagaatggccaaagcactctgtgattttaggtcagaacacaaaaagaaaggaggaggaactcagggatcctacactaggtgtggacctctttgcatttatcttacttgttcattgaacttcttggatgtgtagattaaaatttctccatcagggacccacgtggtgactcatgcctatagtcctagtactttgggaggcttaggtgggcagatcacttcaggtcaggagttcaagagcagcctgaccaacatggtgaaaccctgtctttactaaaaatacaaaattagccaggcatggtggtacatgcctgtaatcccagctactcaggaggctgaggcaggagaatcgcttgaacccaggaggcagaggttacagtgagccgagattgcgccattgccctccagcctgggcaacaagagtgaaactccgtctcaaaaaaaaaaaaaaaaaaaaaaaggccaggcacagtggttcacgcctgtaatcccagcattttgggaggccaaggcgggtagatcacctgaggccaggagtttgagaccagcctggctaatatggtgaaaccccatctgtagtaaaaactacaaaaactagctgggagtggtggtgggcacctgtaatcccagctactcgggaggctgaggcagagaattgcttgaacccgggaagtgaaggttgcagtgagctgagatcacgccactgcactccagcttgggcaacagagcgagacttcgtctcaaaaaaaaaaaaaaaaaaagggaagaaagaaagaaagaaagaaagacaaaaattagcttagcatggttgtgggcacctgtaatcccagctgctcaggaggctggggcaggagaatcacttgaaccagggaggtggaggttgcagtgagctgagatcgagccactgcactccagtctggttgacagagggagactccatctgaaaaaaaaagaataaagaaagtttctccatcaggctgggcatggtggctcatgcctgtaatcccaacaggttgagaggcctaggatggaagatcccttgagcccaggagtttaagaccaccctgggcatagcaagaccacatctctacaaataataatttttttaaaaacctgggca

SEQ ID NO: 498 - DNA, 109880 bp, Homo sapiens
tcagtcatattcttggtgcctgtacagcttttagttcttgaactcctggcctcaagcaatcctcctgcctcagcctcccaaatgctgggattataggcgtgagccaccacatctggccctatattattatttacatctttttgtacgttagaggtatttcctaataaattaaaataaattcgtatacagaaatattaataaatatgtcacctgtccttagttcattagattatatgatgattcttcaagttatatgatctcatgccctgtctgattccatttggggaatacgcattcctccccgaccttaaatccagctctcttctccactgagaattctctccctcccatctgtggctgagattaaagatctgcacctgaagcactgaagaatgtgtgggtaattaaattaccctgccgattcctggagatgctgattacctggagatgacctcagagattatcctaaattaactcctacaagatacatattgcagcgggaggtgaggtaggggaaggattgtgcacctgaggctagcaaaggtttccactctgtttagagatgatgtcaccagtgcgtttacatttgcgttgtgttcacacattgagtgctactatgtacaagaccatgtgtcagacactgaggtaacaggtatagctactagatagagttcatagctatggaggcaagcagattcactgactgctaattctaacatgatgtgacagtgcaactagaaaaacataaacaagcactatgtgagcacaaagaaggtgcacatcaactccttacaggtacctgtaaaagccaaagggtaacagttggattgcaccttgaagaggatgcacttttttttttttttaagacagaatctcactctgttgcccaggctggagtgcagtggggcaatctgggctcacttcaacctctacctcccgagttcaagcaattctcctgcctcagcctcctgagtagctggtactagaggcatgcgccatgatgctgggctaatttttgtattttcggtagacgtgaagtttcaccaagttggccaggctggtcttgaactcctgacctcaaatcatccacccacctcagcctcccaaaatgctgagactacaggcgtgagccaccgcgcctgacctggatgtaagattttgataggtacagaacaaggaaaagactttccaggccgggcacagtggcttatgcctgtaatcccagcactttgggaggccgaggtgggcagatcacgaggtcagcagttcaagaccagcgtggccaacatggtgaaatcccatctctactaaaaatacaaaaattagccaggcatggtggtgggtccctgtaatcccagctactccggaggctgaggcaggagaattgcttgaacctgggaggtggaggttgcagtgagcaaagaccgcgccactgcactccagcctgggtgacagagggagactccgtctcaaaaaaaaaaaaaaaaagactttccagaaggagcagcataaacacaggcatgacatgtttccataatggcaagtggccctaaatgactagaatataaggtagatccagtaggaaaggacttagaaggggctttggaaggtgagtctggaaattaaaactggggtaaacgtgatggaccctgaacatcattatactgcttaagatgctaatcttaatcctgaaggtaatgggaaaacctcctaaggtttatgttattttctttctacttaggctatttaaaaagtggagtgacggccaggcgcagtgactcatgcctgtaatcccagcactttgggaggccgaggtgggcggatcaccaggagttcgagaccagcctgaccaacatggtgaaaccccgcctctactgaaaatacaaaaattagccaggtgtggtggtgggcgcctgtaatcccagctacttgggaggctgaggcagaagaattgcttgaacccgggaagtggaggttgcagtgagcagagatcgtgccattgtactccagcctgggcaacaagagcgaaactcagtcacaaaaaaaaaaaaaaaaaaaaaggagtgacatgcttagatctctgttttggaatgacaggttttttgtttctagcatcaatccaaggttcatggcttgagaaggtgtactgccagcaatgccattaaccagcaaagggaatgcaggaagaggaacagatctggtgggcatcagtttggatgctctgagtttgagctgcctgtgaaaactgcaggtggtgatatgcaattaacattcacatacggagttcaaaactagagacacaaatttgagagtcatcacagaaatgtgaagtgtgttttctataactaaagataaccatgctaacatagccatgtgttacattagcatttttttttttttttgagacggagtctcactctgttgcccaggctgaagtgcagtgcacaatcttggctcactgcaacctccacctcctgggttcaagcgattctcctgccttagtctcctgagtagctggaattacaggcacctaccaacacgcttggctaatttttgcattttagtagagatggggctttaccatgttggccagctggtctcaaactcctgacctcaagtgattcacccaccttggccccccaaagtgctgggattacaggtgtgagccactgtgcccggccttacattttgtgttttttcctgctgcttgtatgtgtgcaagtctgtgtatcatcaatgggtatatgtgtacctgcgctgacaacaaaaaatgagatgcatatcagctactacacaaagctgttataaggatgaaatgcagttagccagtgctcagtaaagggcagttgctttactactactaggtggggtggtgtatgtgagaatctgtatactgccattagtaggctttagtatgtagtgtgcatatggaattcatgcattagtgtgtagtatgtgtgggacccactcacctgagcagcttctctccccacttacagtggcatctgttgaggattcctgtgagggataaggcagggagtgaacttgttacaaggcagggacagggaatggaatgtgtttatgtgtctaagctgaggcatccaggtcagaggtgctggttgttgaggaagctggcctgggagggcacaaaggcagccaaagctggtgcctggccacaaatatgagctgggattaccgtacatggagatgggggaagggatggacactcacagggacacttagccagaaaaatacacaaagcagacctagttaaaactcaagaactggccaggcacggtggctcacgcctgtaatcccagcactctgggaggccgaggcagacggatcacgtggtcaggagatcgagaccatcctggctaacatggtgaaacgcagtctctactaaaaatacaaaaaattagccgggcatggtggcaggcacctgtagtcccagctactcgggaggctgaagcagaatggcatgaacccgggaggcagagcttgcagtgagcggagatcgcgccactgcactccagcctgggtgacagagcaagactccgtctcaaaacaaaacgaaacaaataaacaaacaaacaaaacacaaaaaactcaagagccctcccgcccctccaaaaatacaaaaactcaatagctggccgggcagggtggctcatgcctataatcccagcactttgggaggccaaggcaggaggatcacttgagctcaggagtttgagaccagcctgggcaacatggcgaaacaccatctctactaaaaatacaaaaaaattagctgggcatggtggtgcaggcctgtagttccagctattcaggaggctgaggtaggatgaggcagaagaatcacttgaacccaagaggcggaggttgcagtgagcctaaattgtaccactgcactccagcctgggtgacacagcaagattccatctaaaaaacaaacaaacaaacaaaaaactcaagagcccaacacacatatgtaaaaaactggacggccgggcgcggtcgctcatgcctgtaatcccagcaccttgggaggctgaggcgagtggatcccctgaggtcaggagttcaagaccagcctgggcaacatggtgaaaccccgtctctactaaaaatacaaaaattagctgggcgtggtggcaggtgcctgtaatcccagttactcaggaggctgaggcaggagaatcgcttgaacccaggaggcagaggttgcattgagccgagatcgcaccattgcactccagcctgggggacaagagcgagacttcgtctcacacacacacacacacacacacacacacacacaaaactggacacaactggccaggcgcggtggctcacgcctgtaatcccagcactttgggaggccgaggtggacggatcacgaggtcaggagatcgagatcatcctggctaacacagtgaaacccgttctctactaaaaatacaaaaattagccaggcatcgtggtgggcacctgtagtcctagctactcaggaggctgaggcagcagaatggtgtgaacccaggaggcagagcttgcagtgagctgatattgcaccactgcactccagcctgggcgacagagcgagactctgtatcaaaaaaaaaaaaaaaaaaaacctggacacaacttactgagatatgaaactatatggatatttgcggagatgtccctaatataccctaaagccagagacaactgataaagactctatacaaatcaaataggcagttatgcagttacaaaactcttctctatacacaaggtctcccaaagtccctaacaggtacccaactagtagaaacattcatacaaacccagggaaggaacacagaattggtaaagtaatggctgatatgcaacaacactgtacagccacaaagtatgggaagatgctcaagcttggggggcggggggtacaaataggtaagaaatttggattggcatgaaagagatatctgacaatgggagtgaagtgggaagggaggctgggacacatctttggagccaattgcttttctggtaggtctttgtaatgtgagatgagggatggggcacacctaccaaagaggctgagcccctccttcagtccactggccactttgtacactgaggggtgagactcactcttaaaaatctgtagaacactgtcgaggagaaatggaggagtttggggtaacttggacttttgaagggaataagaattgaggactgataaatggaatggggacaggggatatcctcctgagatcacgtctttttttttttttttttttttttgagatggagtctcgctctgtcgcccaggctggagtgcagtggtgcaatttcagctcactgcaacctctgcctcctggattcaagcaatcctgcctcagcctcctgagtggctgggattacaggcgcacaacacacccagctaatttttatatttttagtagagacggggttttaccatattggtcaggtctcaaactcctgacctcaggcgatccacccgccttggcctcccaaagcgcggggattacaggcatgagccaccgcgcccagccgagatcatatcttgatgtaaggtttgtcccttacttttctttgcctcagtttctccctatagaaaagaaagctagtatctttatgcttttcttcctctctttccctcaaaaccccccttccctttccttcaaggagagagatcttaatagccccaggattagggaaactagagcctcattaggattattggggcattaaacttaatccttctccctccccagagacagcagcatgcctccacctctttacctgtaagtgtcttgatctatgttcaccagatgagtcctgaggacagaaaacaaaaaagcaggaagcagtctgagttcgttccacaactccacttcctttgtccccctctctgaatattgtcccagtcttcttcccaaagtctcattagcccttagattctcccgggtgtcctagagcacttgacccactgggtcacagccacatccacaccccacccccactttacttttcaggcctcccaatcccacattactttggttggggttggggtgaatcacctacaacataaatttcttaaagcccaggatggggacgctgacattatagtcttccagttcaaccccgattcttcttcgacccaggaacttcagcagccctccaagtgctcgaacctgggaggggatcagcagtggaatcggggtaaatcttaaatctcctgggggctgcagagcaccagggaaagttactattttccagggctaggccagtacctcccagaattcagccctagcacttgtgccgcctcccagcccttatcccccaggaccaatctcactgtgaggaggcagtcaaagggaataatggaagagaggaagaggattttctcagtggcagtcatggcgtctgggatgaaggagtagtttccagaaaggaggcgttgtttgcttatctccagacctatttgagggaggcaagcaaagggaacggtcttgtagctcaattttttcaccccattttaagaatgagacaatagaagcaagagagattatttgacttgcccaagctcacacaggcagttaatggaaagctagagcaagaaccaaattttcagactcttagtctaattctctttttattctacatataatataaagatacttgtctgaaagcacagcctgagaaagataaatggctgaggaaagtagacatctgtctggaattgaggattttggtcaaaataatggtattaatagaactagtaacactaatgccttaatatctaattaggatagtacactcctgttcttattgtaaacctaggaaagttatagaagtgccttatggatcataataagggtcactgaggcagtgccttttggtttggtgataaaaggctttaacttaatggggagaattccaacaataaaaccctgtccaaaaagtgtcaccactcctcaggggaggccctcatccctagacatgacttaagcagaggcttcccaataagctgcaggttattaaagggtagggagcaggagagatcttggggggacaggtcatagggcatgaggagcacaaaggtttaggatgacataaggcagaggggagatctgtgatgatgaaggtagagttgggggaaagaatgggacaccggaacagggagttaggcaaagcaaaaggaaggagataccaaaatccacacttggcaaaaatatgatttcaggtcttttaggctctctgtgctcctgggaggctgtgggggaggaaagaaaaggctatcattctttacatctcagtccttctacctctgtctgacactccctctcacccaattctagccccctggaatattccatatattagtccttccccattttccctctatcctttaccaagtccttaccaagctttcccagaaatcgagtcatattctcatcctgtttggcactcgtaacaacagactggggattgatctcatccagaacttggaaggagaacagagatcaaatgagttaaaggatctttgtctttgactaagagaaaacccatagccctcctcttcctacccctctccttctcaaaaacatttcctccctaggagtagggagtgctctgcacagtgggaacacaggtagaagttgagatttagaaaagtagttaagagtggtgggatggtgagagggaagtgggatgttctggatgttgtcactaggctgtaaacccctggagaacagacatgactgatttgcccagggctgaatctgaagcacctgaaacattgtaaatacgtcatatatatttgtggccaggcacagtggctcatgcctataatccctgccctttgggaggccaaggcaggcagatcactggaggccaggagctcaagacaagcctagccaacgtggtgaaaccctgcctctactaaaaatataaaaattagccaggcgtgatggcagattcttgtaatcccagctactcgggagactgaggcaggagaattgcttgaatccgggagacggaggttgcagtgagccaagatggcaccactacacttccagcctgagtgacggagcaagacactgtctcaaaaaagaacaaccaaacaaaccaaaaaacagcctcacaaatatttgttaaataatgaaatgaattcataaaaacaaaagagggagcctctgtgaagcaactgtaaaatatattgagtcagtgctatagtttggatgtgatttgtccctgccaaatatcgtgttgaaatttaatccccagtgtgatagtgttgtgaggtagggcctagcaggaggtgtgtgggtgatgggagtggatcgctcatgaacagattaatgcccttcctggagtgtgttggtgggtatgagtgagaggttctcactctattagttcctgagagagctggttgtcaaaaagagcctggcatctccctcccccttgcttcttctctgccatgtgacctctacacaccctgccttcccttcttccatgagttgaagcagtctgaggctctcaccagtgaagatgcccaattttgagctttccaaccatccagaaccataagccaaataaaactttttttttttttttaacaaattactcagagtcaggtatttccttacagcaacacaaaatatgctagacagtgaggtgagttaatgtaagtaaaacatggctgggcgtggtgactcacacctgtagtcccagcactttaggaggccaaggtgggcggatcacaaggtcaggagtttgagaccaccctggccaacatggtgaaacaccgtctgtgctaaaaacacacacaaaaaactagctgggtgtggtggcacacgcctgtagtcccagctactcgggaggttgagtcaggagaattgcttgaacccaggaggtggaggctgcagtgagccaagattgcgccactgcacttgagcctgggtaacagagcaagactctgtctagaaaaaaaaaatatgtgtgtgtgtgtgtgtgtgtgtgtgtgtgtgtgtgtgtgtgtgtgtaacacatctgcaatcccagagagcagaggaattcatggttccatccccacctctctggagaagcttgaggctctcgtggtctggggcatctggcatgaagtggatagtggagtcactagtatcatagtaggcaatgcccaagtatcctgaattccacagcacacacagatggatctgtccagcaaggaagaaaggaaatcactattagaatcactcataagtgtagggtttaccatgtcttatataatttaatcattttctcaaatctctgagataggcatcatcacccccatttagtgaatgtgaaacagccactcaggaggtaagagacttgcccagctcttcccaaccctgttttttttttctttctttctttgagacggagtcttgctctgtcgcccaggctgaagtgcagtggagcaatctcagctcattgcaacctccgcctcccgagttacagtgattctcctgcctcagccttcccagtagctgggataacaggcacgtgccaccacgctcggctaatttttatatttttagtagagacggggtttcgccatgttgcccaggctggtctccaactcctgagctcaggtgatccgcccgcctcagtctcccaaagtgctaagattacaggtgtgagccaccgcgcccggctcccaaccctcttttattctaacttcccatcaactctccattcaagtttctactcccctcagagacctcggccagctcctcctcctcctcgacttcctcctcctcggcctccctggggcccggcactggggccgggctggggaagccggaggaggccgccccaggtctcggtccctgcggtgtcctccttgggttcgctcctaaggaggccatgagcttggaggctctgcggatgcaaaaagtgagggcggttcggaagcaacgattcacagaggaggccggggtagggtggcgcgcagaatgcaaagcactaagtacttctgctacagggctgcggggcagggctgaggggcgtggagagctgtggacacaggaggtgaattctcgggtatttaactaaagtacagattgtgggaaactccacgcgccccaccctcattcctgtcacgcggaggttaccctttggaaggaaggggtctgagggccctgtggggcgagtcgtgcacgtcttatgtctctgcctctgccaaccacgcgccaggaccccagcctcacgcgcttatcttcctcctcccccagctgccgccatcgcagcgttttcccgccttttcagtaacctgagtcgctacaggtgggagaacgccccgctgaccgaccgccacgagcctgcaaaaggagcgcgccggcgcgtgagcgaggtgcgcgcgcacgcgccccgccctcctaaccgctgttgattggagaggcccggatccagcctagagatccgacagggcgaggaggagaagcggactgccgtagctgaagagtctggacgctgattggcctatttgccttcggggcgggtccagaacgttcaaacttcccgccctctgccgttgcttagcagccgggcctctagcactcactgtttctgggatttgattggcgcagtgggaagcccgcgagaaggtcggaccagggtccgtagtcccagtccctggaaggggtttgggaccgttgcgggggttttgagggggaggccaaacttaaagagccagaggcgcttattttttttcctgcaacaactcttaagttaatatttgtaccctctgagttaatatttatacagagcttagaacagtgcctggcaaacaaagtaagacctaaatgagcggtgtttcaaataaataagcggaaacaagcaggacttctgtctcagccctaccgtgcctgtttcctgggtacagggtatgaccacccccataatggcacgacagggcctaatttattatttaaacccttcaagcagaggtggaagcattcgaattacatcaaattctggcagagagaagtagttctgatcagaacactcacacccctactgggacatgcccataccccttcgcacttctacacacccctgaagacagagaggtatctatcattcatgcattcggcaactatttagtgcctattttgggccaggggttggactcaaagcggtgaacataatgaagtcactgctccataaagcttatttgtgcgtctgtgtgtgtgtgtgtgtgtgtgtgtgtgtgtgtgtgtgttgcgggggtggggttatgagggagaaagaaaaaaaatatatatatatatatatataatccctttaaatgcaccatcctccccagctttgttcctagtaccctgagatggggagattcctccccagccccccaacccaagaagttaggaaagatggtgggggtgagatgacctagctgtgctaaccagtaattggaaaatcccctccagcaagaaaggtgggggaacagagttaagggctgggttaatggttacccctggcaaatctgttgagcaatggagctatagaaacttggaggaggttggtgacagctctggggagtgtcagggagggacccaccttccaatctggggtgtgaagagattagggactagtttaccaagcccaggaaggggagggagtggaaagagaagcccagagagggaaagaggagctactgagataggagaaatgcagggacagggaggtgagatggagggaaacctctgttgcaggatttgggggtacagccctggctctgctggatggttccaggagagggcagcgttgcctgtcacctggtaaattaaggcacgataccctgtgggtagtcatgccagccagccaaagtcaatattgatatcaaggcagctgtagctataaagctgtaggagagaaaagagaggccgggagaggctgccaaacctgtttgatcttcaagctggccccatttacctaaggcttctcttggacacagaccagttggaacaggagaggaccctgagaagtagagttgttttgatcccctcccctcaatgggaaggggtcctgtgtgcagattttgagggtcaccatgagggaattcacacccacacagaggcatggaatcatacccttacaggatgttacagttcaagggaacgaacaccaaagatagcctttctgtcgggaggagagaaaaaggccctcccacaagcaggagaaaacccacagaagaggaagcacaagaggaaaccaccaactgctggtttccagcagcacatcacgtcactccaccccactcctcccccaagtctctccctttctttaagtttcaagctctgttttagttctgtgttcttgcactccaccatggttttctggaactgtaggtcttttgttggacagagggtgatgaggaggatagagaagggatggttggacaggagagaaattcaggatatggaggctggaattctgggtttattttttcagcaggtcataaaggtttaatagaaatcaaggttactggagagagagctgctcctcctatgtcctccctgcttatttatttaggtgtccccaaggactctactcccactattctgtctgatctttctttatccccatgacaggaccagctaacaacacccctaccccaccccctatacacatacttcaggatcgggccatgataatcccacccctctgccccatctccaaggcaacctgtcagtgagacgaggacaaagggcacaggaaggggccccaataggaaacataagtggaagcacaaagctgaccaagctacaggaacagacccctccctgcaacaaagccccttgcctcggctttatgtttccttcgcaaaagacttcgtcatctcccttcccatccctaactctactttctttttcttttcttcttcttctttttttttttttttttttgagatggagtttcgctcttattgcccaggctggagtgcaatggcaccatctcagctcactgcaaccttcacctcccgggttcaattgattctcctgcctcagcctcccaagtagctgggattacaggtgcccaccaccccgcctggcaaatttttgtatttttagtagagacagggtttcaccatgttggccagtctggtcttgactccctgacctcaggtgatccaccccccttggcctcctaaagtgttgggattacaggcgtgagccacctcacccggcccctaactctatttcctatgcccaatcccaagtgtaggccacaaggactgcaagtcctagtgctgagctgggcccggagacagtagactgcggggggcacaggacctactgagacaccagtctgggcagctcagggagtgctggcgtcaccccttccctaatcccaggctgcatggctaacggttcctatctgcagtcccagccttccacttccgagttcttctctcagaccacagtcccagcaacccagaatttggattggagtctggaagaaatgcagaatgattaaacgaccacctttccatttgaagtccccatccctgaatcttcacgggtgtgcccaagctgttagtgtcaagttttttatatgagggtcagtcgggttgtactcagattaatgaagcagggaaactgaggcagaaaagagtcctgtgttcaggagaggtcggagaaacaaggaggttttcaggactcctccttaacacccccatccccatcctgtgggagatccgaggattccccttccggactcactccctacatcgtcgagtcccgcccccctccagtcccctccccaggttcagggcggggccggtcggtgagtcagcggctctctgatccagcccgggagaggaccgagctggaggagctgggtgtggggtgcgttgggctggtggggaggcctagtttgggtgcaagtaggtctgattgagcttgtgttgtgctgaagggacagccctgggtctaggggagagagtccctgagtgtgagacccgccttccccggtcccagcccctcccagttcccccagggacggccacttcctggtccccgacgcaaccatggctgaagaacaaccgcaggtcgaattgttcgtgaaggtaagaacacttctctcctcagccacccaaattcctggaagccaactctcacctttcccccggtccagccttaactccccaatcccttccctccttgactcccacccccaatcccacgtgcactctttggttgaggggtggttttgagaggggaagacattaacttgttagcaagtaatgagaattctaggatcaaccctgaaaagtttgtaaaagtgcaagtttctagcagactaaaggaagggaagtggagaaaaaggagaattcccaaaagtgagactggggtggggttagagggcgagctggtgaagggacagtgggggcccagcagggtttagaagggacagaggggaacctcagttaggacatgtgtccctacaagatctgagggtgagtagtgcagtaggagaggtgtgtgtgtgtgtgtgtgtgtgtgtgtgtgtgtgtgtgtgtggatggagacgcttcagggaagacggtgtgttgagggaggcctgagagtgagagcaagtaaattgggaagctttggaggggcggaacaaaacaggagactgggatcggagtttgaaaagcagagctggagaggtgatcgggtggcattgaatatccccaggactggggaaagggacagaaggggaggtggcaagaagacgtgagtttaacgtagctaccacaaggatgggtgggagagagatcagacggaggagaagagctcggttagggcattttgggatttgggggttggagaagtagaagacttgccccaactctctcctctctctgcgggtgtgggtaaggagagatggtcctatggcatttgggtagcaaaactgcaggcagcaggcttctcggtgtcacccagcccccctctgattgcagcggccgctcccctccctaccgctgctgcattcatttcccagtcttgggacctcctggctgtgcccctccctcccttccttaacagtgtcctcttctccccgctccgtttgtgtctctccgttggcacgcacgtctccccactctccactttcctgccgcctttctttccccttccccccttttgtttctctcatctttgtgtgtctctgcctgtgtctccctctcccttctgcttgggtttctcgggcagccattccctctccctgggcccagggaagtcggagcctgcttgggtccgcccccttaggtgtggtccccacctcactctcacattcgcctccggggctatttttactcgtgggtgaggctgtgccgcagagattccggccctgtgtcctgtgagaggatggttattgcagtcagaggacttgtgctgggagaccctggcagcaggttaggggtagccttagctgcccaggcctcatcctcactgtcccttcccccacatccttgacaggaaggaagccggagacagagagatgaatcaccctcagcttagggggaggtgtcccttgggccaatgaggtcaccacttgctaattagagggcagcccctctctgtagggccctccacatctctagcgcgaggcccagggccccttgactagactccccacccaaagacaccttggattggaggtgtagagaaccaaaactctggctcccaaaccccacccacctctcctgtcttcagactctactcccttcaggaacccagaaatccaggcttctagcctacaactctggcctcactgaagttccacacccttccctctctaggattcagatcctcccaagttctccaggacctcctccctctacctacctcccacctgtcctcagtgtctggggaaccagaagcctgcctttgcaaaacagtttcccattgatctgccttaggtttgacccaggcccaagggcaaagagcccatagtgaggggacagtgtatgtgtcatgactaggcagaaaacagctggtctgggagtgggaatgcagggactggcctagggatgggtggggtgcatcaggcataaccttgggttggggttacttttcaggctggcagtgatggggccaagattgggaactgcccattctcccagagactgttcatggtactgtggctcaagggagtcaccttcaatgttaccaccgttgacaccaaaaggtaggcctgcttatgttccttgaaacacccctggtgtacacatgtgtgcaaacacacacccacccgagtccttctgtcatgaacatttttgccctccccctggagtccctttcttatcccacgtcctccattccccctttctggttcttcctgacccccatttccagtcctgattcctgatcctttctccaggcggaccgagacagtgcagaagctgtgcccaggggggcagctcccattcctgctgtatggcactgaagtgcacacagacaccaacaagattgaggaatttctggaggcagtgctgtgccctcccaggtataggggcactcagaaagtggagaggtggagcagggagattctgggaaacagacagtttgcagaaatggaaaacagagatggtggtggggctggggcaggagagctagctgaggttcctcccaggaagacatcttacctcatttttcccattggctttcaggtaccccaagctggcagctctgaaccctgagtccaacacagctgggctggacatatttgccaaattttctgcctacatcaagaattcaaacccagcactcaatgacagtgagtcttgtgggtcagaggcctgggtcctgggaggaatagagaggacccagcgggtaggagacattaggggcacctggacgttcagatatcagggagatgaagcagatgttcgtaaatttcccccagcttcccatttttgctttacctctatatttccctgcattttcattggccaagacttttaagcttttctcatttgttccctagcctcttctgccccactgaggacgttagttggctgctggcctgttttctggcagaatagggtcatgcttaagaacagtcatcactctagatccagactacctgagtacaaatccaactagccgtataattttgagcaatcatttcacctctctgtaagtccatttccagatccacaaaattaggatgacaatacctatttcatgggttgatataaatttttttttttctttttttttgagatggagtctcgttctgtcgcccaggctggagtgcagtggtgcaatcagctcactgcaacctctgcctgccgggttcaagcaattctcctgcctcagcctcctgagtagctgggattacagacgtgcatcaccacgcccagctaatttttgtatttttagtagagacagggtttcaccatgttggccaggctggtcttgaactcccgacctcaggtgatccacctgcctcggcctcccaaagtgctgggattacaggagtgagccactgcacccggcgatataaatgagtttgtaaaatgtaaagtgttcactttgggaggccgaggctagcgcaccacctgaggttaggagttggagaccagcctggccaacatgactggtctctactgaaaaaaatacaaaaattagccagttgtggtggcaggcacctgtaatcccagctactcaggaggctgaggcaggagaatcatttgaatctaggaggcagaggttgcagtgagccgggatcatgccactgcactccagcctgggcaacggagcaagactccgtctaacataaaataaaatgtaaagtgcttagaataacacatagaaaagtaactacatgagtgttagctattattattttggactcaccattagtatccacccccaacgggccttttcggactatgtcaatcttttcctgaagttctaatcagttccctctcttgcacagatctggagaagggactcctgaaagccctgaaggttttagacaattacttaacatcccccctcccagaagaagtggatgaaaccagtgctgaagatgaaggtgtctctcagaggaagtttttggatggcaacgagctcaccctggctgactgcaacctgttgccaaagttacacatagtacaggtgtgtggttattgcgggaggagaggatgaccactggagtggccctttaaggagctcccacatgggcttcccctgacaaccactctaaagacgatttctttcttagggtggttttcataaattgctaccaatggcagaccccaccccagtcctttgcagcagtcattgctaacaagaccactgcttgagataattatattccatgatgtaagtcatgggtgcaaacagactagcaaagaggaatacatcccagtattacttttgaagaatgctcttcctgtctcggtatcactgccaaattcccagattagacagagcaggcttttcctaaagtcaaagctttaactttctttataacttcagtcttcacttcctcttgtggaagatcaaaactgctggttcccatgtttttgtcatagtctcaaagctatggtttagtttgtgcaacatgggcctgacatcagtctgccacacaactatgtagtgaacatctgtgtactaagcattgaaagatacacaagtgtatggtgactgggccttgctctcaaagggttgaaatctgagacaataaaatattcacatgaaagttaagaatatatgatgaaaagtcagatgggccgggcgtggtggctcacgcctataatcccaacactttgggcggccaaggctggtggaccacctgaggttaggagttcgagaccagcctggccaacatggtgaaaccccatctctactaaaattacaaaaattagccgcacatggtggtgggcacctgtaatcacagctatttgggaggctgaggcaggagaatcacttgaacccgggaggcggaggttgcagtgagccaagatcgcgccattgcactccagcctgggtgacagcaagactccatctcaaaaaaaaaaaagtctgatgaaaaatatagagacaaaagtcacctgtgtcagtgcctgaagtggtatagggggaaaaagtcactgtggaaattcaagaggagaattttataagtaaattatatctcaagttttaaaaactcaggaaaaatggctggttattaaaagccaggatttcagtaagtgagaaggaaggctaacgacagtacaagacagtgaggagttgagctggttttatcatgtcggcctggggagaagggaaagccaaggtggcttccctgggtctaacatgttggtccctctcctctccccatcctcaggtggtgtgtaagaagtaccggggattcaccatccccgaggccttccggggagtgcatcggtacttgagcaatgcctacgcccgggaagaattcgcttccacctgtccagatgatgaggagatcgagctcgcctatgagcaagtggcaaaggccctcaaataagcccctcctgggactccctcaaccccctccattttctccacaaaggccctggtggtttccacattgctacccaatggacacactccaaaatggccagtgggcagggaatcctggagcacttgttccgggatggtgtggtggaagaggggatgagggaaagaaatggggggcctgggtcagatttttattgtggggtgggatgagtaggacaacatatttcagtaataaaatacagaataaaaatcaagtgtttttacgcaatggggatttaaagtgtgggcgacatggaatgaggggtgggtcagtgatcttgagctcagggcagaagccaggaattaagaagggaaatgtttgtggtggggctgctatgtttcgtgccggtccgccggtccgccgttgcgctgttctgaggtctacgaagcgtttgcagccccgtcgccagggccggccagatctgggtgggcctgggcagcgctcgctgggcggtgccgatttctggcaaggggggcgcagtctggatgtaatgggcgaggcttagcagggcggaatgggcgtggcccgaagaagccccgccccgtcccgcttagacaatgccccggagccgccagaccgtcgcgcccctgccccatcgtagtatatgagctcgcctacacaaggacccgcgctaaaagccagagctcccagtccccgaggcttgaagacggggactcccttctccaccaactctgtcctcggggggtggggccccagccgagatcacagcgcgacaggagtgggggtggccgctggaggtgagtcttgcgtggggggccctgaaccgtgtgggggccggagtttgggggtgccgggcccatgcctgcaccagacagagagtatggggagccggtatttgggcgcggagctaggcggggtggactttgggacatagacggggaaccgggtcctggagccgggagtagtgccagcgccccggaaccacgccccctgttaccccgcccctcgcatttcgttttagacctctcccagtccttcgggactcggtctggtttatactaggtcgcgctaggggcagcgtgaccagccagggcggagagaggatgcttaactccttaggctcgaactcctcccttcctacccacctctctcccttctcgttcgggtattcaggacttccattccccagcccctgcctctccagctttctccttctgtcccataacccctgcgggtcgcgggctggacttccagtccctgcggtagcgagcagctgagggttaagggggcggggctgctgcatttttggggagtgagcgcatcctagtggctgccaagaggggcgcccgacagggacctcacaagcccccaagcaggggcaacaggtgttttggagattagagaccctagccttgttcctcaggctcctcttaaagaatctgacccctgagggtgctgggtagagtgaggtcgacaggagcggaaggtctggagtgggtggggcggagtgggagggacgcctagagatggcaggaggaagacctgggcgctcttaaccacccccaacgcccttgtctgcatgtctttttctctgtctcctccttttctgtttcttctcccagacaggtgaagaaacaagaaaactaagaaatccgagcggttggagggggagtctgtgtggatgggatggggacgccgggggaggggctgggccgctgctcccatgccctgatccggggagtcccagagagcctggcgtcgggggaaggtgcgggggctggccttcccgctctggatctggccaaagctcaaagggagcacggggtgctgggaggtaaactgaggcaacgactggggctacagctgctagaactgccacctgaggagtcattgccgctgggaccgctgcttggcgacacggccgtgatccaaggggacacggccctaatcacgcggccctggagccccgctcgtaggccagaggtgagcgccgtggcgcgggtgtggtatggggaaaggcagaaggaactggatgtcggggctttggggaagaattgaggatgggggtgtcacagctccgtgccctcttctcctatcctaaggtcgatggagtccgcaaagccctgcaagacctggggctccgaattgtggaaataggagacgagaacgcgacgctggatggcactgacgttctcttcaccggtgaggctggggggaggcataggtcttggcacagggaagtagagtttgggagactcggccgtctggagccttgtttctaactcactcccgccctcaaacctccgcggcctcccggactcaggccgggagtttttcgtaggcctctccaaatggaccaatcaccgaggagctgagatcgtggcggacacgttccgggtgcggagcgggaccagcctagggagggagggggtgcaggtgggggtcggaagggcctgggcgcccgctgaggaaatgagaggcagagagcagcctatgtttgaagataccccatcacccctcccgcgcccctgaatacctcccttcgctctccctaggacttcgccgtctccactgtgccagtctcgggtccctcccacctgcgcggtctctgcggcatggggggacctcgcactgttgtggcaggcagcagcgacgctgcccaaaaggctgtccgggtgaggagggggcggggccaacgaaagtgggcgcagttctgggcccgggaggccgggagctgggaggcttaggaaattagccctaacccctgccctcaatgggctgtccatcttacatgaaagaacacaggagaaaataagaagttacaacagcaggactgggaacaggggtgattaatttgctcttccggagtttcaggaaaccccaaaggtggcacctaaactgtgactctaaggatgggtaggacagataggaggggctggggaaggtagggggttgaaaataactgcatgtgattccaaggtggaaattagcaaaggtaactaaagtacttagtgtctgacatatcgtaagctctatgtgcttgctgtcattattttccacaaatgtcagtccgtccccagcccttagtggtggttgagcaggcagacacagctgtggagaggttctgagactcgaacacttcctctttcctctaggcaatggcagtgctgacagatcacccatatgcctccctgaccctcccagatgacgcagctgctgactgtctctttcttcgtcctgggttgcctggtgtgccccctttcctcctgcaccgtggaggtggggatctgcccaacagccaggaggtgagagagggcaggaactccaacaccaagcaccatcagagaaaagagtttcaggctttcctagtgggaggaaggaagggtaccttctctagaagcctgggtggggccactctgagctggctggaagagtggcctggctcagcctgaggtctcactcccctctccccactccatgtcttccctgtgcaggcactgcagaagctctctgatgtcaccctggtacctgtgtcctgctcagaactggagaaggctggcgccgggctcagctccctctgcttggtgctcagcacacgcccccacagctgagggcctggccttggggtactgctggccaggggtaggatagtataggaagtagaaggggaaggagggttagatagagaatgctgaataggcagtagttgggagagagcctcaatattgggggaggggagagtgtagggaaaaggatccactgggtgaatcctccctctcagaaccaataaaatagaattgaccttttagactgggctgtgactggtgtcttactggggcaaagggatagggcagggctgaaacctgagtttggggtcagtgcagggaagaaggcctcttattcaaaaatcttgttaggtacttatcaactcattgcccaaccatgtcataggtacttgagcacaagatgaacaagacagaatttctatcatgggaagtgtgtccagggcagagaaaagagtgtatgggtggattgctcactgaatttatctaaatgttagatgattcagagactggtagattaccagtccacccctatttgataaagaaaaagaaatgacacttccagggacattcattttcattcattcatttaatgaggcttagcaatgatatcaaaagggtcagtctcctgacgttggggagctcacagtacatgcaaatttcttacaaattgaaatacaggttgtcatggaacaatttacagaaggctgtttctatgagggaaataaagggggtgcgccctagggcatcaaagtatatgcaaggggtggccaaggagggtcaccttcccagaaaaggccatacttgaactaaggataaataagaattagccaggcagatagtgtgaaggagggaaaggggtaatacaggaagaaggaattgcactgggcaaagacattttggggctagggagaattctctaaggctggcattttctaagatgtgcatgtggaatgacacaggtaagcctggagagtggacaaagtgctgtagtaccttgtatccaaagccaaggcacgtgggcacagagctgaagctaaggagagtacttcagttctgtaataagggctgtcaggagcagttatctcttgagtaggatctctctgacttcagggaggaaagcaagggtaggaggatgaggtggggctatgggtaatccaggaaggaagtgagcagagtacattcacgtggcagcgctgggcatggaatacagtgtgggtttgacagtgatgttaagatagaaagactggacttcatggctcattgtgtgggagtaagagagaaaggaggtctgcgtgactcccagtttctgggttgggcaactgggttgttaaagagaatacagaggagaattaagtgagcagcttcagagatgacaatgagttgggtttgacattcagagtgcgaaatgcctgaggtcagtcaggcagaatgtctaagtggaagtttgttaatcccaaatctgagatctgagccagagagagttctgagtgtcatttgcagaggagggggctgaggactgactgttgatgagagtgtcccagaagaagagaaagggacaaacctagaatggtgggaaatactgtagggatatggagcaaggaagaggagtccaaaaagaaaacaccagcaacaaagaaaaacagcttaaagaatcaggccgggcgcggtggctcacacctgtaatcctagcactttgggaggccggggcgggtggatcacgaggttagcagatcaagaccatcctggctaacacagtgaaaccccgtctctactaaaaatacaaaaaattagctgggcgtggtggcgggcgcctgtagtcccagctactcaggagcctgaggcaggagaatggtgtgaacccggcaggcggagcttgcagtgagggagatggtgtcactgcactccagcctgggcaacagagcgagactccgtctcaaaaaaaaaaaaaaaaggagctagggcttgattgggtatagagaggacactggtggtgagggagacatggaggttataggagagatgggagtaagtttagaagtaagaccagtggcagagacagcctggaacccaggtctcccaactcccagtctagcacttatttctataccatggtgccttcctcttccaggtgaggaaccaaggaggggagagggattatggggagctgggatcccctagcttgggaggtttggagtaagggcttcccttcaaactacaactgcatagatggtggaggcatcagcagggtccgctgtggacagccggcggggcctgctgagggctagatggtccagatccgcatagagcaggctctggaggaggaaggggaggaagacaagatggtctccacagtcttccttggggttcaggcctttttttttttggtccattttcctcagagattctggctatccccttcccatccccatgcccttaccggttcctggtccaggtcccctggaatcttgggctcttcctcctttactggcctctggggctcggttttcacaagtggagctatgtgggggggacagagctgaaggatggagagaaggtgaccaacgtgtctgctcccagcaagggctcagactcaggaattgaggggtggggagtgggcatgtaggagaaagaaaatggggtggaattagtctcaccaaatctagggagtggtcgaatcggttgcgggggcaggcgcctgtaagggacatatgagtctttgagaaccaccagtcttgtctcactggttctcctgggactcgccacgccaaggacagcccagcaacttgaaggctcagaccggaaacaacttagactctaccccaccgacagtccagcccaggctctaactctgctgcacttccagctcatctgctctggtggggctctactcaccagtcagcggcctcgctcccacctttgacctctcccattcttcgccaagccaggaccagagctctaggtctagctctttcttttgcgaaggttctggtcctgccccttccacctctggtcactccccatttaacgaggccgggtccctcctgctcacctgtgcagccaccagaccaggcccaaagctcccagtccgagcaccaacccagcgcccagcagcgggatcaggagctggggatacacggaccctgggggaaaggcgtggcggggagggatgctgaggtcaggggtttgacgagggacagccagcagtcccgctcaagaacccccagccaaggccctcttccctcctccgggtatgtgtcggagttaagtacccttgtgcgcacaggcctgcacctaccatgggtaggcccgggggccttgcaataggtcctgtcccccagcacgtgaagcactgtacggctctcgtcctcgtggcggcccttgcagaaaaaagtgcccgagtcccccgcgctcaagaggagctccagccgccggataccagagtccagggagcgtaggcggccgacgaaaggctggaggggaggcacggtgggggtcccgctcgaagaggcccacaggatcggtcggcgtcctttggacaggcccttgcaggccgggaagctgggtgcccagacccagcggatgggatgagagactcctccgcaggagagattcacccggtccccagggcggccgtccagagaagctaggagaggccggaggctgtggttagggcacgtccacagggcaagacgaccctccatcccgtctcctctttctcttctctgttctgcactccagccatcctggatcttcccacacacaacccaccctactaggcggcccttatcttgcttcagcccctctgcgtctatcacaactctcccagggatcgcttacccccagggttcccttgggccctcgagagcagcagcggtagcagctgcagaaacacagccatggttaggatgtggtgaggagaagctgcgagcgaatcagcggcgtggggccggttggggggggaccggagggaagttaggcgtggggagaacggaggggctggggggctccgataagagagggggcggggccaccagctgcccagatccctttgggaatcctcgcaggcaaactcggagtcttcaaatggttctcacttaaaatgtgtgctcgggccatttacacaaatgctttggcctgcttaacttttcaggtgcgcctgtaatcccagctacttaggaggctgaggagggaggatcgcttgagctcaggaggtcgaggttgcagtgaactgtgatcaggccattgcactccagcctgggcgacagagccagccagaccctgtctcaaaaacaacaacaaaaaaaactcctgttttgtaggggattgtgataacgaaataaagtaatacatgtaaactgcttagaatacataggatcactatgtaagtgcttgccattattattactatttctattcttttttttttttttttttttgagtcagagtcttgctctgtggccaggctggagtgcaatctcgactcactgcagcctccggctcctggattcaagtgagtctcctgtctcagcctcctgagtagctggaactacaggtgcatgccaccacacctgactaatttttgtattttcagtagagatggggtttcaccatgttggccaggatggtctcgatctcttgaccttgtgatccacccacctcggcctcccaaagtgctgagattacaggtgtgagccaccacacccggcctactatttctattcttattttagcttctacctcacctctctgtgcccatgctgttcctcctggcttggtaccctgcccaagttggcaggttttgactggggaggtgctttggagcaggtgcacacagccacacctaggacaattgctgctgctggactggagcaacaaggccacaccaagcgcaagtggagcacgggtgacatcctgagaaccttcatgggagcctgaggcagccctacttagcagacctgtggtggctctcctggatgagtagccccagcccctgcctctgctgctgtggcatcacagaagccatcagtgagtcacttattgctgagcaggcattggaaagaccgagtgggggctgaatggagattaatttgacccattcctcccccaatttccaccagcatgcccctatcaatgcccagcagggacccagggacccaaattcagcaattaatttgggccacatccttttgtccattttccaggaaccagcagaagctgccaccatggacactgtaaatcacagaggcctttgatgatgctcattcagaggactgagcagcaggactcttagctggggaccaggaagggcatcttggcctgaaaccaagaaccacaatggcattggccactagtggcacctgccttcccccatccctctctcccatccctactccccactcagtcctgctcagtgccttcccaccccttgtcttttctctggtcagctgcgtagtaagtgagaagggaggggctaccagaggcagggaagggaggagcctttgggtttataaattccaaaaaggccactcaactcctagagctggatccttgaaaatctactctatcagctgctgtggttgccaccattctcaggaccctcgccatgaaagcccttatgctgctcaccctgtctgttctgctctgctgggtctcaggtgagcacctgggggccccaaagacctggtttgcctggtcaggacctttacaccctgctctacccacttcccggccctacccaccactcgggatcccaacacccccagccccaactggctcagctctcctgtgccaccaagaccaggcttccctatgacagcctccttgctctatttctcaaaaagccaggtctccatccatcctccccacctccaagaaagacccatttctctcacctgccagggctctgggtcccctgttccccactccaaggtgtctcctccttggaaactctggtatccagttccccaaccagccccacttcaatatgcaactctccagagtctagcttacctgccttctcctctatctgctgtgctcagtaaggtgtcctctcgaagacctaggcatccagccccaggctccttttgtaacctaccctccccatctactccatcagggactcacatgttcagtctctcagccatggcctttcctagataccccctactcccctcctgggttgcatacctcctcccatacaggggatacaaactttctagatggttgcagtgacatctaagagcctccatggaaacagagcgttttcttgagccttctgaagaggggacaactgggccacttacctccagggtgaagtggatttcactgaggtacacttaccaggctcttccaccctcggaccctgcgtcaccaaatcttgcctgcccaaaccttgaattaactgaagcaggaaacttggggtgccaccttctgtatccaccctctccattttgataaggtgctaagatggaatctggtgatctgtctctcaggtatcattcctttctgctgaagagctactggggtgagaggattctattcaggtctggttcctcttgccacactcttgccagctccaggaggtgaagagtaaattgtaaattgctaaagctggccacagatggctttctcgccagcctcaagttccaaggcatttctgacagtgttgtaaccctcatgattttcatttttattatttctccttctttcaagtttccatctcctccttcaccatccacattctttccccatggtatcttcctcacattccatctatctccagccccatgtttttcttcatagttctgtccctcttgactcacctccaaacggggtggagtgatggaagatatgtagggcgtgggcctttcacaaagcaacagctctacccttacctgccgcccactttccattttccctgcatcactcacctgctctgtgcttgctagaccaaacagccaaacaggttggagcacctacgggatgggctcttctccaccctccacccctgcccccagctcagcttatccccaggtaagtcagagaccccatcacctcagcctgacttgtgtcttcccagctgacattcgctgtcactcctgctacaaggtccctgtgctgggctgtgtggaccggcagtcctgccgcctggagccaggacagcaatgcctgacaacacatgcataccttggtaacatccccttccttagtggggtgaacagggaggtgggagcctctatgaccaggactgaggcccaaatgggtctaagactgagatggagaagcagaggattatagcaatgataatatttggccaaagatggttgtgtgccaggcaacatcctatgtctttgcatgcctttttttcaattaatgttcatgacaaccctgtgatgtgggtgctattattatactgagaaaacggcctcaaaaagagacagtaacacagccgggcatggtggctcatgcctgtaatcccagcactttgggaggccaaggtggttggatcacttgaggtcaggagttcaagaccagcctggccaacatggtgaaaccccatttctactaaatatacaaaaattagccaggcatggtagtgggcgcctgtaatcccagctactcgggaggctgaggcaggagaatcgcttgaacctgggaggcggaggttgcagtgagctgagatggcaccactgcactccagcctgggcgagagtgagactctgtcttggaaaaaacaaaaaaacaaaaaacagagacagtaacaggtccatggccagcaagtgatagaaccaggactgggggagtggtgggtaaggatgtgcagaaggaagatcagactaagaaaagagaaggggagggccagggacagagttgggaaggaaggaagcctaggtgggtggatggggtggggaggtggacacaggcatgccaggtgcccatcctggccgattccctgcccattcccacccctaggtaagatgtgggttttctccaatctgcgctgtggcacaccagaagagccctgtcaggaggccttcaaccaaaccaaccgcaagctgggtctgacatataacaccacctgctgcaacaaggacaactgcaacagcgcaggaccccggcccactccagccctgggccttgtcttccttacctccttggctggccttggcctctggctgctgcactgagactcattccattggctgcccctcctcccacctgccttggcctgagcctctctccctgtgtctctgtatcccctggctttacagaatcgtctctccctagctcccatttctttaattaaacactgttccgagtggtctcctcatccatccttcccacctcacacccttcactctcctttttctgggtcccttcccacttccttccaggacctccattggctcctagaagggctccccactttgcttcctatactctgctgtcccctacttgaggagggattgggatctgggcctgaaatggggcttctgtgttgtccccagtgaaggctcccacaaggacctgatgacctcactgtacagagctgactccccaaacccaggctcccatatgtaccccatcccccatactcacctctttccattttgagtaataaatgtctgagtctgataaaatgtacatttattataagaagacctaagggtcaggtcacctcccaggaaataatactctcaatctccctcccttacacaggaatccttcagggaggttccctgggaggctgggctggggaaaatggagaaacaggtttttcaggtcttcatcctcccttccagtgtctccaggtggcacacaacaactcatatcctaaatttaggccacacccctgatgtattgccaagaagaaggtgcggcctggcttgagggctctccagaaaggataggagaggtacatggagatggggcctgagaccctgtttcttcagtttctctcaggttagagtcaaaggcctcacctagcctagttagtaagtagggcatcaagcagtttttacctatcacagtttttacatttcttttctcaattcaaaatagtcctattgggagccaacttgcaaatgggaaataggggagcaaacccagactcaggctcacaaaaccctggcaaccccactcaatgaatctcattgctaaggaagattcaacccagcaacaggatccaggagccacagaaggcagataagccattgccctttggggtttagttggttaaggagtgcaccactgtaattaagcccgctgttgcttggtaacccccaaactagaacctggatgccccatattacgcttttagccctcccatcaaccaaagatagatgtaattttccagtcagctgtagagtggttcatagattttaatgactcacagaaggatgtttctcttctcacattagatgttcagatgtcccttgttcccttgctcccttgttcccttctctactcctactccccctatccgctccacagtcctggcaagagacaggtcagggcggtagctgctgcagccaaaatgcctgcaggggccacatggcttgccacggcgctgttgcacaggtctcccaggtagcagtccctgtgggctggataagtcacgtctcccaccgactctgtctccacttgattgcaatgatgggctgcgacgcaggctggatgttggtgaatcaaggtcactggggctgagagagagaatgaaactggggtgttggactcctggcttcaggacttgccttctggggcagagcagatgtgatttcaaggagcccaaagggattttcagccccctcaaaaaacacctccctgaaaccaagtgatcaaagttaatgcattgaccttgtaaactcctgatgtgatgcagcaagaaggatgcaacatcacttctgcagtattcttgcttaaaatgcatgacctcaatctcatcatggcaaatatcagataaataaatatcgagggacattctataaaataatttttagtatttcaagtatctgtaattttttttttttttttgagacggagtttcactcttattgcccagctggagtgcaatggtgtgatctcggctcaccgcgacctccacctcttgggttcaagcaattctcctgcctcaggttcccgagtagctggtattacaggcgggcaccactacacccggctaattttgtatttttagtagagacgagatttctccacattgatcaggctggtcttgaactcccgacctcaggttatccacccgccttggcctcccaaagtgctgggattacaggcgtgagccactgcatccggcacgtaatttttgtttaatctaaaaatgattttatttaattttagagaaaagatcttgctctctcactcaggctggagtgtggtggtgcaatcatacctccctatagcctcaaactcctgggctcaagtaatcctcctgcctcagcctctcaggaaactgagattacaggtgtgtgccactatgcctggctaattttttaaaaacattttttgtagagatgggggtctcactttgctgcccaggctggtgtcaaactcctgacctcaggtgactcttcagccttggcctcccaaagtgctgggattacaagtgtgtgccaccaagcctagcctaaaaattattattattattatttttgagacagggtctcattttgttccccaggctggagtgtagtggcgtgatcatggctcattgtagcttcaatctcccaggctcaagcgatcctccctcttcagccccctgagtagctaggactacaagcatgtgccaccacacccaactaattttttaatctgtttgtttgtttgtttgtttgttttttgtagagacagggtctccctatgttgcccaggctggtctcaactcttgggctcaagtggtcctcccaccttggcctcctaaagtgctgggattacaggtgcgagtgactgcactggccctaaaagtaattttttaaactccaggtataaaataatttatcagggctcttcaaatgtgtcagggtcatgaaagacaaagaaaaacagaactggcacagatcagaggagactaagaagacatgagagctaaatgcaatgtaggatcttgctaaatcaaataaagtctgtagattagttagtagtattgtatcagttattttgtgattttgataattgtgctatggttatgtaagatgttagcattaggagaagttgagtatttctgcaacttttctgtcaatccaaaattatgttaaaataaaatattaaaaacatgtacacacacacacacacacacacacacacacacacacacacccctccctggtccttaactaatgccgaaaatttgaagtttggttttaactttggcctttcagggccagagctcttcatttgtgagctaatgggcctatgagattcttttaggagaataaggaggtggggaagtgggggcacaaggactgtgggcctctcaggggctccgtgccaggagccagaaggggtacagactgctctcctctaacagctgcaccatctgcccagagccagactgagcctggagggttctggaagccagaaggattgacatggggctggaggcagggaaaggctgctggaagagggagaaactgaggactcacggtttccaggtagcttgatctgttccaggcctggctggggtctgccctcgccacaggtggtcacggcctctttgcaagaactgctggggcttccaccacagttgtagcaccgcattcggtttcctggcaggagaaaagaggcgctggacctgggccctcggtggagccggctggcagaaggcctgtgtgagaagctagctggccgcctccttacccaaggcagcccctagcagggagctgagcaagatcccaacaaactggggtttcatcgcagtctgcccgtgtcaggaccgcctctacctcctgcccacccccctccccagcccggctctgcctgccttatatcccccgtgccttgagctttatagggctataaaaaaggaagaaagagtctcccccagcaggcaccaagggccccagtggggacagggaggggccccacagcatgctctcagcatcctctggagtcctcaaactcctttatcctcagcagcagtctgtggaccaacaagaacccctgaggatccctgataccctttcacagggtccttgagggtcctccttttgcaactatctgtgtaaggtcagattttcttcatatactggacttcaacgaaaacaacatatcccaacagactgaatgcagaagcagataggaaaacccaggcatctcccacgaagcctgacactagattcacaaaaatgtaaagcaatgctcagcttctcactgtgctgtggagaaataatagttatttttcacaaaactgtattttgttagcatgtaatactttattatttttattgtttaaataaatcaataaatacctactttaaattttctgttttaatttttaatgtagtaaatattgatataacctcataaagaaaagctcttcagagtcttaagtaactttgaaaagtgtaaagaggtcctgagatcaatatttttgaaaagagctgctctcctgggcacctgtgtctcccctatcttcactccctgttcctagtcttactcctcctggtacatgctggctctgattccccagatgggccttcctccttcccagtctcttcaaccccagccttccaggctgtatcaccacccccctaccccaaatcccatccatgccttcctttctagtgatttctccccagtgcaagcacatcagcaggccctccagccccacccgtggttatttctttcctccaaggtagtaaagctggcagggataattacagggtaggaatgttgaagcttggggggatcaaagggatctgaagctgggtggggtccgcccttacacagctgggctttgtgtgtgcatgtgggtgtgtgggtgggggtattgttgattctacactcaaacagatccacgccggggctgtttaggagggtgactttgagagacatgaaagcactgagggggaaagacagagaaaacaaagacagagagaagctgagagagccagggagcagcttgagacatggggagggagggggaggagtaggagggaaggcgacagacacaactcaggagcaggagaggaagctaagttacagagacaacatgctgagagagcagaggagaccctccaggcaagggcagactccttgcaggggcaggctgggggcccccgctgcctgctgggtcaggctggtgaatctggtcatggttccgccccccagattcactccctaggtgtgtttgtttactggttcctcactgtcttgctcaaatgctccaactctacaaatcccgggatctcggggtgcagatcacctctcccagattcctgagcctgtgtctggccatgggcacctccagcatcttcctctgcgtgctgttcctctgtggggcactgggtaagggtgggctggggaaccttcagtggtcagggggctgggggtggggacaagggcatgtggaggaacctgagggctggggaggagaggggtgtgggtgctggaagaggccaagaagagagctgggggagtgggggacttcagggagaccagccactgggaaggccagcctgatgaggtgggaaaggaagagtttcctttcaaggcatttgagaataactgtctcccccttgctgcatctttgatccgcccctgtctcccctatcccttatttcacgtgttgcttctgtgctgggccctttggtcaatgtcaatttctattttcctatctgtctctggtgccatttacttaactttttcactgaccccctcaacttccctgctgctgggtctggctttttgtctcactctttttatgttggtctctgattcttgtggcttctgttcatgtctgcgcatctctcaatccctgtacccctcttgcctccatctctgtttcttttcctgcatcgtctccctctttttttttgagacagagtctcgttctgtcacccaggctggagtgcagtggcatgatctcggctcactgcaacctcagccacccagattcaagagattctcctgcctcagcctcccaagtagctgggactagaggcatgtgccaccatgcccggctaattttttgtatttttagtagagacggggtttcactgtgttagccaggatggtctcaatcttctgacctcatgatcagcccgcctcggcctcccaacgtgctgggattacaggcgtgagccactgcgcccagctattttttctacttctgtcagctttcctcccttattccacagctttcctctctctgcttcatgtgtcacctctctctgtgatccctctccggatctggcctctgcctgccccacagggagggtttgcctctcctgctctcctaatctctgctgcctcaacaggtctcaccatgtcccctgcccggggaaggctccgctgctacatctgtggcttcaccaaaccctgccaccctgttcccaccgagtgtcgggacgatgaagcttgtggcatcagtattggcacttcaggtaggactctggtccaatggcccttctccaggaggctccctacctccatccatccggcctttcctgtggcccccgcctcagcatgcctctttcatcccacagaccagagtgagatcactgagtgaaaaagctgcctctcaagggcccagtgccctctgccaggctatgccacctactggctgcactcctacactctgtggcaccactgctgcgagcaggacctgtgcaacatagccgcttccccacagcagctcaccagcctcctcgcctccctgcccctctttgtggccagcttcgctgggagaggacacctcctccactagcttccgtggatctgcagcccccaacccaggataccccccgccatcactgcggccctggaaacacctgcacagacactttgagacatgcccgagaacctaattttgtacagagaccccagatctctcagcagacccctcacagacccctcacaaggcctggggaggcacctgcccagagtccaacctcataaagaacacctattctgcgtcttttgtcttttctagatgcccattgctgatgccccgtgtcagcccaggtcactggcaaggcaggcattttgatgacactgtggatctcaggcaaggggatcaaaggagcatcaggtatggtaaggaggagagtcttgctaggaaagactaatgtggtaggtcgggaactcaggatggagggcttgggggactatgaagagtacctttaataaaaggtctatctaggagtccagtaatactgcagatactgcagtgtgtgtgtgtgtgtgtgtgtgtgtgtgtgtgtgtgtctgtgtgtgtgtgctctaagagcaaactgtagctgcttggtgggttgggctggagctggaacctggaccacggcactcccctcattctccatctgtgtcattttcgtcctttttcttgccaatggcttagtttaagcccctgcagcctgaagcctttaggtgagacttctgagaaagcttttttccagtaaggcccaagcttgagcagagacacaaaagggcacccagtggagctgcttgtgagggtgtggctggagctcagctcatttctgcctgagactagggaatggccaagttgggagcatcaatatcctccctcgcttcaccagcccagactcgcccatggttcacagacatcccagcatggccccggcccaataaataacatacccccactgggcctgccagcctgagtagacactccctctgcccccgagaaatagggtgtgacctcagggcagcaggaaggaagtgccagagtggcgatagctgctcacatgctctgaatgccccggtaaggcgccacagggaagagtgtgtgcctaggataaggaaggataaggagggggccccgggtgggagctgagcacaggcatctctatcctgactcagttccctccccttgcatgtgaggaagtctggggttgattaaatatgcctgttccctctcttctttgtgaggatgagacatggggtagtgggggtctggcttaatttagagatgggttgaggctttccattttctctgtccctccatcctcccactttgtgcttctatttttctccctctgtccatctctttccactttctctgacttgagtctcttcccttctctctcttcccccgttttccccatttgtccttcagctccactgcaatggattcctcaccattgctcaagtctccagattcctgtctcctccctgtgcacacccatcctccttgcccccaccagcaacctcaggctcccctcaaccccacagtactatgggctcagggccatccctccactgctgctacaagacaggagaccaaacctttttgtaggttacatcacagaataatgctcctcctttccttcagtcccccacccctccccatacacagcttggtggctgctggaggccagctggatggtgaagtcgaactctcagtcccgccccccttgctaaggttgtcgaggaatcttccaggtgccagatggccagcgagacagcaggtcacacttcccagcagatgtcaccaaaatcacctgggcttgtgggcaggtgggctgtggggttttccagagagacagattaaggatacctctacttttcacatcctcaggaacgagggcccatccccaacccaacccgtgtttcctctccatccccagtcccctccaggatttaagcctctgttccctagctgttcctcacccaagacgggccaaatggatgttctcatagacctggatttcgggtttgaactgaggaatcgaggcatctggggagaaggagccatcagggatacagaagagaagtcagcagacaacttagagccgtgttcctcgccccctcccctagaggaggtggggtacagaggcggggtgtgagcctagccctttgcctcccacccatgtgccctcttctttccccggggagggagggactcacctctgcctggagccccacggaccctctgcctccagagcacgatgctgagggccaggatgacaactccctggcccattgtgagcagcagcatcagaatccaaggcatgtcccagcccgtggaaggggcacagagggcaggagaagcatcgatggaggctgtagtaagggccagaccagagggatgggagggaggtagtgaggggccctgtccctgtgccccaaagagaggcttcccctccacagtctggtgggctcttccaacagaagactttgtaagcttccctgcccacaatatcctccaccctactctgcccctttccaggcctctcaccctgacccatagagaatggcggccaggcacagtggctcatgcctgtaattccagcacattaggaggccaaggcgagcagaccacttgaggtcaggagttcaagaccagcctggtcaacatgatgaaacctcatctctactgaaagtataaaaattgaggccaggcgcagtggttcacacctgtaatcccagcactttgggaggccgaggtgggtggatcacctgaggtcaggaggtcgagaccagcctgaccaacatggtgaaaccccatctctactaaaaacacaaaaaagaggccgggcgctgtggctcacacctgtaatcccagcactttgggagaccaaggcgggcagatcacgaggtcaggagattgagactatcctggccaacatggtgaaaccccggctccactaaaaatacaaaaattagctggacgtggtggcatatgcctgtaatcctagctactcgagaggctgaggcaggagaatcacttgaaccagggagtcagaggttgcagtgagccgggattgcgccactgcactccagcctggcgacagagagagactctgtctcaaaaaaaaaacaaaaaaaaacacacacacacacacaaaagttagccaggcgtggtggcaggcacctgtagtccagctactcaggaggctgagatgggagaatagcttgaacccaagaggcagaggttgcagtgagccaagatcgtgccactgcattccagcctggccaacagaacaagtctccatcccaaaaaaaaaaaaaaaaaaaaaaaaaaggccaggcgtggtggctcacacctataatcctaacactttgggagactgaggcaggcagatcatgaggtcaagagatcaaggccatcctggccaacatggtgaaaccccgtctctactaaaaatacaattttttttttgagatagagcttcgctcttgttgcccaggctggagtgcaatggcgtgatcttggctcactgcgccctccacctcccaggttcaagtgattctcctgcctcagcctcccgagtagctggggttagaggcatgtgccaccatacccggctaattttgtatttttagtagagacagaatttctccatgttagtcaggctggtcttgaactcccaacctcaagtgatccgcctgcttcggcctcccaaagtgctgggattacaggattgagctaccatgcctggcctaataataataaaataaaataaaataaaataaaaagtagagaatggcaatgccccctgctcacgcatgggcaaccaactacagagcagaccaccagccataaccacactttcccctcacaccctttatagtaattcaccctttctttcaagaaaaaatagccagatgtgatggctcatgcctgtaaccccagcactttgggagaccaagataggaggatcatttgaggccagtagtttgagaccagactgggcaacatagcaagatcctgtctctacaaaaaatttaaaggtgcggtggctcatgcctataatcccagcactttgggagactgaggcaggcagatcactagaagtcaggaggttgataccagcctggccaaaatggtgaaatctcgtctctactaaaagtacaaaaaattatccaggcatggtggcgggcgcctgtaattccagctacttgggaggctgaagtgaaagaacatccctttccgtctccttcctcagtttacctgccaggctaaagctgacccctttgttgtgagtcatgaggcagcggatgattcttggtcttcggctcctgggctcagaaagcccctccccaggacacaccaagagcagggcagcctcactgccccagaaggactgaacacggcccctcacgggacccttcccttcctgccaggtcacagagtccatgcgtctgctggggaccacagagcacaggaggacattgcagggggatccatctgcagcccttgcagataactgggatcctgtaggggagagagggattcctcagttcttcacctggacttcctgggccacagtagcccctggtctgcatgcccccactcacctttgagcaccaagacgtcgtacaccctccagttctggtagttgtggtgctgacctagcacagcgcaccagtaccgcccggcatcttcctctttggatccctccaaccacaaagaatagttccccagcagtctgagcctggattcccttcctggttttccagggtctggggctggcctgcccacttggacttgggctaccagggtggtgaaggagcctgctgcagggctgcagaaccatgacaggtgttcgtccccatgtagagtaggtggtgagggacatggcagctctactgcctcccccaaggccacatagatggcctgcatgttgtctgtgggaagagggttgtatgaggccagagacctccatcagatcaataaccccccatttgatcttcaaccctggcttccttcccttctggggtcccccagcacaggcctggctggtgaccacatttctcaagtgacagctacaaaaataagacaggtggagagaagagggtaagggctttcctcctctctcccccagccagtgagggggtctgagggcaagagggaaaaggctgaaagttggcaaatgcccacatctcttctactcatttctacttttctggaagcatttactcattcttcttattttataaaggaaactgcataacctggaccctcgttgcctctgggtcttccctagtgtcagaggcaggaggaggttggttggggtaattctatcttcttgagtcagatgccttcgccaggctcctaggagaaagagcagtagtccctccccaaccttgcaaatagctaaggaatcccgtacctcttgccccttacctgcagcctggggagttccacataggaacaggaggaggaataagactgccatggggagagcctgccaagttctcttgctccaagacctggtgtccccagggaggaagcagagtccagataaaggcccacactcgctggtctggagtgacaaggggctctggaggggatgggaatgctggggcgataaagcccagcagcatgtctactagggataaagtgaccaccacttttctatcctggagagaaaaggacccagcccaggccactctgaagatgacctttttgctcttctgattccacatcagctaaggggctcaaataaagactttccatgcaaaaaaccatgcagagaagtggtcctgcctgtctagctcttgtcagtctggaagtacattctgaggtctctttcactcctaagaaaggtcagccatgagttgggtggatcacttgaggtcaggagttcgagaccagcgtggccaacatggcgaaaccctgtctctacaaaaaatacaaaaattagccaggcgtggtgacatgtgcctgtaatcccagctacttaggaagctgagaggcaccagaatcgcttgaacccgggaggtggaggttgcagtgagccgagatcgtgctactgcactccagcctgggagacagagcgagacttcatctcaaaaaaaaaaaaaaaaaaaaaaaaaaagaaaaagaaaagaaaagaaaagaaatgtcagctatgagtgaagaaactgagtttgagtttttatgttggtcctccacagaacccagcacaagactgtgtatcgagtcagtgtcccgtaaatgatttggaatgactttccctgtggttgtctggcataccccggacctctcctgaaaccctaataagtgtattaaattattactcagggacaaggctaacgggctgattcatccttctgaacggcaaaaactcctaaggcagatcttcatgcagttattacagttttaatgtgtaatttatttatttttaaaattattttgatgaaatattccatacataccaaaaactatatgaagtacaactatataatggataaatgcttaacagagtagaagactggacagcaatgagaatgaacaaacctagtgatttgcaacaaagttgaatctcacaatataatgagagtaaaagaagcctggccaggcatggtggctcatgtctacaatcctaacacttttggaggccaaggtgggagggttgattgaagccagaagtttgaggttgggcaacagagcaagaccccaactctgaaaataaaggccagacgccgtggctcacgcctgtaatcccagcactttgggaggctgaggcaggcggatcacgaggtcaagagatcgagactatcctggccaacatggtgaaaccctgtctctactaaaaatacaaaaattagctgagtgtggtggtggatgcctgtagtcccagctactcaggaggctgaggcaggagaatcgcttgaactcaggaggcagaggctgcggtgagcagagatcatgccactatactccagcctggtgacagagcgagactccgtctcaaaaaaataaataaataataaataaataaataaataaataaatagaatattccaggccggactcggttgctcatgcctgtaatcccaccactttgggaggatgagacaggcggatcacctgaggtcaggagttcaagaccagcctgaccaacatggagaaaccccatctctactaaaaataaaaaaattagcagggcatggtggtacatgcctgtaatctcagctacttgggaggctgaggcaggagaatcgcttgaaccccagaggcagaggttgtggtgagccgagatcgggccattgcactccagcctgggcaataagagcgaaactcggtctcgaaaaaaaaaaaagaaaaagaaatagaatattccaggccaggcacagtggctcatgcctgtaatcccagcactctgtgaggccaaagcaggaggttcacttgagcccaggagttcgagaccagcctgggcaacatggtgagaccttgtaaaattagccgagtatggtggtgtgggcctatagtcccagctactcaggaggttgaggcagaaagatggttgagcccagcaggtggaggatcagggcagtgagccgtgattgtgccactgtgctccagcctgggtgaaagagctagaccctgtctcaaaaaaaaaaaaaaaaaaaaacagaaaaaaagaatattccgtttcagtcagagatcctctatgctgtgtaaccacaattctgaattttctctttcttctccacttgctttatcattaaattttatgtgtttttgaatctaatatactagtatcacgtatacattcttctgtggctttctattttcactcagcatcatggttttaagatccagttcatgcataacagtaatgattcatttattttctttttacaaatattccgcatatcttactgtgctgaattttcgtatccaggaccatggtgtagctttccatttattgaaaagcttttcgtttacctctttctttttttattttttcaattattattgttattattttgaggcagggtctggctctgtcacccaggctggagtgcatggagcgatctcaaactcccgggctcaagcgaccctcccaccttggcctcccaagtagctgggactacaggtgggcaccaccacaccctgctaggtcttttttttttcccccttggtattttgtgtagagatggggtctcactatgttgcctgggctggcttggaactccagggcgcaagcaatcctctctcagccaccccaagtgttggaattacaggcatgagccatggcctggaactcctggacgcaagcaatcatccctcggccacccaaagtgttggaattacaggcgtgagccaccgcgctgggccagtttacctttatttatttatttagagacagagtcttgctctgtcaccaaggctgaagtgcagtgggaagatctcggctcactgcaacctctgcctcccgcgttcaagcgattctcgcgtctcggcctcccgagtagctgggattacaggcgcgcaccacccatgccaggctaatttttgtatttttagtagagatggggtttcaccatgttggccaggctggtctcgaactcctggcctcaagtgatccccccgcctcggcctcccaaagtgctaggactacaggcgtgagccactgcgccgggccgggccagtttgccttttcaataactttttatagttttcttcataaaaccttgcatttcttgtactagatacattcctagacaccttatgttttcggttactcttatcaagtactcctaatctcacccctcgtttccgctgtcgctctagagtctgccaataatgagacagaaaaaaattattgaaccatgcccggtaattttctgattctccgcgttctagtggtcttccactagtttcggaccactgctgtacccgtagctccaactgcgcgaaactcttctcaggaagcactgaaaatgtcgcaactcgcccggaggcggagccggtacgggctgacgtcaagggcacacaacacctcagaggcagggagggcggggccggcagggggacctgctgctggaagagcagcggcccgagccggggccatggcgaagctgctgagctgcgtcctaggcccccggctctacaaaatctaccgggagagggactctgaaagggccccggccagcgtccctgagacgccaacggcagtcactgccccccattccagctcctgggtgagtcgagttcctccccaccgaagaacgtggtacagtccaaaccctttacggccttttgctccccagaagtgcccataatgggaaataaggggagcctgcttgtcaagccagttatccgcaaaatctgcgctctgtgtgcttcctgagttaaagtcacgcctacggactggccgcctcctttctttttcgctctttaccgctttctcattccgactgccactctttgttctttcctctccgcgtccccccgaccctgtgtgtcgtggttcgtgccggtcccagttgagtcttgagtcccgggaagagaccctgcgcggactggggagccgttgaattttgctgtcagactcccagtttcctcttcttcagtgcctcttcatgcctcccccggctctgtttttatcttccctttaccctcgccttgaatttcagaatgacttttacagatcctgtatccgtcggtcctcccctcaacccccgcccaacctagcctggagacccgagtcattgtattctggagagctggcgggtggtggtaggctgttctaaatattctcttcctttttatcagttgtctcattgtgttactgtctcctacaaactgcccgctcctacccacattctcttcttagtcaactactcttatttctgatgcttttctttccttcttagattgtctaggtgtcttttctttcttctcaaactaacccttctccccacatgcacgcgcctgcaatccatttgaaactaggctgtggaaaaggagcaaaaatcgtccaatgctgctttcacttttgcttccaaatccagctccctgtgtttgttcccatggtcaggggtgggaaattaggttcagagtgagggtgaggaagaggagtttctgtgggggccagggatgtttcaagagagatagtcaacgagactagaaccagaggacacacagcagggcttctgaaagggaagggaaaggacctgccagtgggcagggtccttaaggaggccatctgttttggcaggatacgtactatcagccccgtgccctggagaaacatgctgacagcatcctggcactggtatgtctaccctggcatctgggactctgcatctttcagacccacctgtcctcttgaacttagccctccctaacttgggagcaacagtgccctggggttgggggatgccctgggctctgcagcagacctctccaacacagacacacaggcacactctaaatgtgcatacttggcactcccctttggtatgtagcactgctttctctgggggcaacctgagccgtaaggaaaacatgtttactcttgggaccatctgcaggtgctaagtcctgcagttccccagtgacctgtcctccctggcaactaacctctttggctgcagggacagctgttctttctggcacagttcctgtggtgacgtttgcgcatctcttggggaccaggccaggggctgtcctgagcagggccaattgaaaaggcttgattaacttgagtagacagagagactgcctttaaatgtgatggaattatgtctggagatggaagacataattcttccataattccagaggaagaaaatagagcctgtaccaaattttcccagcctccattacattgacacactacttttcaacaaatactgagcacctactgtattcatggtgtcatacaccaaatatgatatgatatccctcaggttgtccatcttgctcagagtgtatagtatatgcctggaatggcaggtgtgtgtgtgtgtgtgtattgattgcctgtccctgtctctctgctgcaggcttcagtattctggtccatctcttattactcctctcccttcgccttcttctacttgtacaggaaaggtcagtgtggtttcaaaggtggtggggtagcaaatgggcaggttgttggcagatgagccagctccctaaagaggagaggggacctgtgaagatggcttggcttccctcttccatcaggcatcttcttcctcttagggtatggctgttccaaacagggagtgtggggtggaggttggggctgaactgggaagaggagctgagggacattgcggagagggtctcacattgtccctctcccttcccaggttacttgagtttgtccaaagtggtgccgttttctcactatgctgggacattgctgctacttctggcaggtgtggcctgcctccgaggtaggtggagaggaaacctggtttgaatcttatctgtcactgtcactggttaaaaattaagtaccttgtgcaaatacattttagtgatgggcctccgagagggaatcattgagaatggtttaaggcatgatcttttccttaaaagacttgggttataaatatgaaaaaataactgaaaagtaacaaaaaggtttgcttttttttttttaagagatagggtctcaccatgttgtccaggctggtctcaaactcctgaactcaaagtgatcctcccacctcagcctcccgaagtactgggattatagatgtgagccactatgcctggctgcttttatctagaaaagatgcatataccctacaacaattctatatatgtatacatactaggaaaactcctgcacatgtataaacaatatagatgtacaagaatacagcatacaacattgtttgtaataatcctaagctggaaacaactccagtggctacaaatagtaggatggataaaatatgttctgtgtggccgggtgtggtggctcatgcctgtaatcccagcactttgggaggcagaggccagtggatcacgaggtcaggaatttgagaccagcctgaccaacatggtaaaaccccgtctctaccaaaaatacaaaaattagctgggcatggtggcacgtgcctgtaatcccagctacttaggaggctgaggcaggagaatagcttgaacctgggaggcaaaggttgcagtgagacgagattgcgctactgcactccatcctgggcaacagagcaagactccgtctcaaaaaaaaaaaaaagttccatgcaatagccatgcaagagaacactatatagcaatgcaaatgaacaaactgtagctacgctcaacaacgcagatgaagccaggtgcagtggctcatgcctgtaatcctagcagtttggtaggctgaagcaggcagatcaccagaggtcaggagttcaagaccagtctgtccaacatggtgaaaccccgtctctactaaacatacaaaaaaaaattagccaggtatggtggtgagcacctgtaatcccagctattcgggaggctgaggcagtagaattgcttgaatccaagaggcagaggttgcagtgagccaagattgcgctactgtactgcatcctgggcaacagagcaaggctccatctcagaaaaaataaaatacaaaaaattaactgggcatggtggcacatgcctatagtcttaactgcttgggaggctaaggcatgagaactgcttgaacctgggaggcagaggttgcagtgagccaagatagcaccactgcactccagtctgggtgacagagcgagactctgtctccagataaacaaaagcaatgcagatgaatttctcaaatgttgtgttaaatagaagaagctaaccacaaaataatgtatgcagtatgttttcatttatataaaattcaaaagggatgtgcatgtttgaggtagaacaccgaagacaacaagggcatggttttctttttttttttttttttttttgagacggagtctcgctctgtcccccaggctggagtgcagtggcgcgatctcggctcactgcaagctccgcctcccgggttcacgccattctcctgcttcagcctcccgagtagctgggactacaggcgcccaccaccacacccggctaggtttttttgtattttttagtagagatggggtttcaccgtgttagccaggatggtctcaatctcctgacctcgtgatccacccgcctcggcctcccaaagtgctgagattacaggcttgagccaccgcgcccagcaagggcatggttttctcaaaagttaggagagtgattacctggggtgggggagaacagagtgggggagagccctgctgagaggtggctgtgttctctttgttgacctaggtgatagtcacatgaatgtttgctttgtattttttaaactgaatatatgttttatgtacatatgttgtatctcgcaatttaaaaaaataaagaggacagatcacctacccctagtgggtacataagatgacaaccaggtgatgggcgatgcttcaacatgggggtggtggggtcagggctggatggtcgcagttgggtccaggaccttctgcctgaggtgttctgccccctgatctctgcagggctgggctctctcctcagagaggccttccctgaccaccctgtctaaaagtagctcccactgctcagttttgtcttagttttttattttatttatttttaatttagaaaaaatacagaaaaaattagctgtgcatggtggcgggcgcttgtaatcccagctatttgggaggctgtggcaggagaatcacttgaacccgggaggcggaggttgcagtgagccgagagcacatcattgcactcccgcctgggcaacaagagcaaaactgtctcaaaaaaaagaaaaaagaaaaaatacagaaaagtccagagaacaaaatataaaagcctttttaaattttttgatgtatagttttgtgattttttttttatatatagttttgtgatatttgctttaaatgctttctgtcaacaaaatactaaagcaccacagttagggttggagttcccattggaatcctttcagtcccatcttcctctttcctcagaagtaataattgtcatttggtgtgggttttttttttttctggcacatacttttatgaaacatatacctcagttcctcaagtctaagctgccatcaattgtaaaatgaattctaatttcagagttttcaagggttaaaaaatatacattttagaatctatgaaatatggtatctataagcagtatgtattattttgcacattttacatttttggcataaatgttgtacaaatcattctgcagcacacatcattctctcatcatatcgttttgggggaataccattgatgacacataaagttctggttcattcttgttgtattttctctgtagcacttatccctctctgaaatgttgtttattgtcttctcctggctgtacctaaccccaaccagaatgccagctctctgagagccaggagctgtgtatctcatttcctgctgagtctcccgtgtgtagtacggtgcctgtctgacacacgacacctgccaagtcagtgaggagagaagttagggtttgaggtggctcagcagtgaaaggagagtggatgcaatcactgactgtgtaagtgaaaagagagaggagagagagtcagcactgagagttgcttctgcttcagaaaggaaagcagaaaggaggcaggagaggaactgttcaggaactggaaggagtcaaggatgggcccaggaagcagaggcaggaagaatcttgagggacagggagaatgctgagtagtacagttgaagagaatgaggatagaagagtcaggaattcagtgaggaagtaattatgggcaggagtcggagactctgaagccagatggcaaggggctagaatatacagaaaagaggcagaaagcaaacattggagaagaatggcagtgaaaaatagagaaatttgatattcgcaagggagaatagtattatatgatagtgtttaatagtgtcatttaataggttatatgacagtgtttaaagactgaggaagaggaacattctggaagatggtaggttaaggattgtctataaagacacaaactgcagaagctagggagaagaagcgtcctgtagccagttgctggatttggaggaagggggttggctcacatctatttctccgcatcctatgccctcagttcctttttctttcactttttcttacagggccttcttctagcccatctccaattcttttcctaaaacctaggctttctgcttcccagttttcctagcactgtttcctgtcctttttctaccaggcattggccgctggaccaacccccagtaccggcagttcatcaccatcttggaagcaacacatcggaaccagtcttcagaaaacaaggtgagaggccctaggaaaagtgccacacaggcacccaatagcagctttctcagttgtccctcagagcaccagacactggcttctgcaggaagaggaggtgtgttttaccacccaccacactgggtgtttgcttgcacattgctgtatcccttctcacctccattagtgaactgtccacctgaggaatttttcctccctaccacttctaatggaatattctgctagaacaatcttccccctccctcacctgtaagaactggctaaactagaaacattccacaatgtttcttttttctttttctttttttttttttgagatggagtttcgctcttgttgcccaggctggagtgcaatggcacgatctcggctcactgcactctccacctcccaggttcaagtgattctcctgtctcagcttcctgagtagctaggattacaggcacgcaccacccacaccctctaatttttgtattttttgtagagacggggtttcaccatgttggctaggctggtctccaactcatgacctcaggcgatctgcctgccccagcctcccaaagtgctgggattacaggcgtgagccaccactcctggcctctttttttttttttcttctttgagacagagtctcactcttactcaggctggagtatagtggtacaatctcagtttactacaacctccaactcccgggttcaaacaatgctcatgcctcagcctcctgagtagctggaattacaggtgcacaccaccacgcccagttaattttttttttttttttttgagacggagtctcactctgtcgcccaggctggagtgcagtggcgccatctcagcttactgcaagctcggcctcccgggttcatgccattgtcctgcctcagccccctgagtagctgggactacaggcgcctgccaccacgcccggctaatttttttatttttagtagagacggggtttcaccatgttagccaggatggtcttgatctcctgaccttgtgatccgcctgcctcggcctcccaaagtgctgggattacaggcgtgagccaccgtgcctggccaatttttgtatttttagcagagacagggtttcatcatgttggccaggctagtcttgaactcctgactgcagacgatctgcctgccttggccttccaaagtgctgggattataggtgtgagccactgtgcctggcccacagtgtttctttttttttcttttgagatggagtttcgctcttgttgcccaggctggcgtgcaatggcatgattccagctcactgcaacctccgcctcctgggttcaagcgattctcctgcctcagcctcccaagtagctgggattacaggcatgcgccaccacgcccagctaatattgtatttttagtagagatggggtttagctgtgttggtcaggctggtctcaaactcctgacctcaggtgatccacctgccttggcctcccaaagtgctgggattacaggtgtgagccactgcacccagcccacaatgtttcttagaaggtagttttctctgtatcacagcagctcagttctataaatgtttaattttgttgtatgcattgaataccatgctatccttgtttgtggatgggacaaggtggacaggtgtgtccactcctatgcctgggagtacagcatggtgccaggagggagaaaagctagggctcagtgtcttgggaattatgccaagccggctggtgctggactgtgattatctttgaggatgggctttggggccccatagagctcttttctgttatgggaggtttctaggatcaaacagctatgaccaccatcatcacattcctggctactccacactatggagctgcgtaatgatgccctgtactatgctactggctgaagcatttggcacacaccctttctgatcctcacaacagctgagtgaggtggcattattacctttatttgtaaatgtgagaaaacagaggcaaaaagaggttaagtgacccattcggagtcatagagcaagaaagtggctaagtccagatttgagagcaggtctgagcaaagcctgcctgaaatttgcttttagtcatcttgttttgttttgccatttacctttttgtataatttttctattgctctctgttagtcaaattatttttgaaatgtcaaaaaatttctgtgcagaaaataaaaaccctcaaaatagagtgctaggagctcagggggtgggggacgaatatagtcaagtattaagacacagctaggccgggcgcggtggctcacacctgtaatcccagcactttggaaggccgaggcgggtggatcacgaggtcaggagatcaagaccatcctggctaacatggtgaaaccccatctctgctaaaggtacaaaaattagccgggcatggtggtggcaggcacctgtagtcccagctacttggaggctgaggcgggagaatggcgtgaagccgggaggcagagcttgcagtgatccgagatcgtgccactgcactccagcctgggcgacagagtgagactccatctcaaaaaaaaaaaaaaaaaaaaagacacagctcccactgccgtcaaaaaacgtggagctggtgaggtggttcatgcctataatcccagcactttcggaagccaaggcaggaggatcgcttcagcccaggagttggagaccagcctgggcaacatagtaagaccttgtctctaaagaaaattttaaaaattagctgggcatggtagcacatgtctgtagtcccagctactccagaggctaaggtaggaggatcacttgggcctgggagtttgaggctgcagtgagctatgattgcaccaactgcattccagcctgggcaacagcacgagaccctgcctcaaaaaaaaaaaaaaaggcatgtggactggctcagtggggtggcccgaggttcggatgggctgtagggcaacactgatccatggctgcaggagttgaggaagggatgtagttgtgaggatggaagtcagagcttccttcaacgggtggccccacatggcagaggagcccactgtgggcgtgacttccctcctctctgtctcactcaaccttgggtctgtcagtgtgatctgctgggagatttctaagcttctaagacagcaccctataagggacccaggtggggaatagaccgtgaccagccagcgacccctactacccgtcactcaaaagcactagcaccttcagccactcctcctggggatgggtcagacttagttttttagaaaagcagagtgttaggttcttagcttggaagagggcagacaggccagtcctgatacctgatggggcataccatctcccctgattttctggtcctgttagaattttccatctgagaattgggagggtattgacctccgcttggtttccccatgatgtgtggggatcagacccctggataacgaaggtgttgttgagggtgggtaggagagcctcccctgagttctcagtacccctttgcctctcgtgcccactgcagaggcagcttgccaactacaactttgacttccggagctggccagtcgacttccactgggaagaacccagcagccggtgaggccccagttcttttgctgtatctctccccttagaaccattccagaaaatctctgctctgccctcccacctccatgccctctcaggtcacagtgcctgccttccaatgccattatgtcgttcctagaccccactgttctccagacctcagacatccagcttgctgctcctgaccctatccttccctgcatctttcccttcctcaggaaggagtctcgagggggcccttcccgccggggtgtggccctgcttcgcccagagcccctgcaccgggggacagcagacaccctcctcaaccgggttaagaagctgccttgtcagatcaccaggtgggaaacagcagcgaggagaggcccactggggtggaggggccatttcaggagtgctctgggagtgggcgctccattgtaaaatagctgtcactcattgggcctagtgctgtatggtttgtgtagatcatttatggcaaagtcatttttatccatatttatgtttgaagaaaagaggctcagagaggtctggagtctcaaatgtagtaagtaaagaactgggatatgaacaaaagctccttcagtgaggctgaaaaggagcagtgggggtggggtgggggtggggaggacacacacttgtagctagggcaggctctggtagcatctgtgtacccatcgtggcccctctgccctgttgttattccaccttggctccgggcccctgtgtgcctcagtgtctgcacctgtgatgaacctgccctgcaaggttgctgaggagattaagtaaggtaacatgttctgaagggctcctgccttgcctgggtgcttgagagcacatggtaaatcccaaataaagctcagtcgtgggtactgatgatgtcagaaggaacggaaataaccacctatatcttatagtggaacagacactgggaattttcttttgctgggagttaggaggcagcttctagaataccaaggaacagggtggacttagtggttggttgttgacagtgtgctaattagtcagggaggcaagccatatttgaggttttgaattataaccatcattttttaaagcattatttatttggggacctttaatatgttgtacttatattttaacagaatcataatctgatgataactttgcatttacttattatgtatagacagttacatcataaaactctcagaattctgtacatacaggatatgtgtgcactgagccacaatataaaatgtttatcttacaaaggttgcagtaagaaaagtttgcaaaacactagcctggtacatatttcattaaggcttgaaagaggaaagtaaagctgtgaaggtcaggggtaaagcaggccttacagtctgtgagtgctagggctgggatggtccccagcacagtccccaggcctcaacagggttggggtttgttaacctgtgttccccacagctacctggtggcgcacaccctagggcgccggatgctgtatccaggctctgtgtacctgctgcagaaggccctcatgcctgtgctgctgcagggccaggcccgactggtggaagaggtgaggcttccctgcccgcacatcccctaaagccctcccctctcacccccacccaccccgccccacccctgtgatgtggcctcctgacccttgcatcttggccattgcgtcttccgtactcagtgtaatgggcgccgggcaaagctgctggcctgtgatggcaatgagattgacaccatgtttgtggaccggcgggggacagctgagccccagggacagaagctggtaagagggagcagagagcccagaggtggggtgagtgtgaggaaggcagtagaggtctggggaccccaatgctatagcacctccctgaaggaaccactactggggataatctcatgtcctagctccacgctaaagaccttgtgatgtagtgaaaccctgtgatagagaaacagatgaagtaggagagacgttcaaggacgagaaactaatattaatagttaccactttgacagcacttcacacttatatatatttaattctcatatatatatgaagcatatatatttaattctcaaaagaatcccgtgagataggtactgcttatattagcccattttacaggagatgaaactggggcacagaaaacctttcctggacctcacagtaagtggtagagctggtatttggacccaggcagcctggcctcaaagtctcctacctccatgaagcagccgtggaaagagcgctaagccaggagtctagggagctgggttctagtcctggctctgcccatctgttatgagagttcatgcaaatcccaccattcgtgggtttcagcttggggcgccatggcattacagtttatctgaccataagactggagctcagagagggatagggagagcaatcagcataccacacaatagcaatggtcacagaagataacagacccgaaaacgagaaaggaaaaacatctccatagtccccttcctgaaagagatccagctggtaatcttccaaggaaaagacatggctgggtggtcgagcaggtcagcctctgaggagtatttgtaatccctttgcttctcctcttatggaccctgtggaatgagaagcttccattccccttggagaaaacagaaacctgccctttcctcttccctgcaaagctcttcatgggctgccctccctgcccaaagggagtttttcagtcccaacttggccccccagcccttccttcctgcctccttcctaggtgatctgctgtgaggggaatgctgggttttatgaggtgggctgcgtctccacgcccctggaaggtaggacggtgactcagcctccttatctccgccctttgaaagggaatgtccctgcctcccacactgacctgacctcccctggcctctgctttctctgggtgaggttttgagtctctcagctttagggaaaagtccactcgccatttgctttgataaccttacatccctcccctggcctgtgtccctagctattatgcttttcattctgttccattcccccaccacacaccccacacaatcacatgctgctccctgtgctgcctcagaacctctggtgtcatctcctatttctgggaaggcttggagttatttgcatctaagctggggggtacttctgctcttccttcccccagggatggagaaagggctgtgggccacaaggtctcagtccctcctccccctgtgttacagctggatattcagtcctgggctggaatcatccaggctttgctggaagcacggtgagaccatctcaggaatcccttccttttcctgaattatgtctgtttccctctggtcagccattggagggaggagaggggctgtggatttcttgaaggcgtcccactcacctgagggctggggtctaggaggttgtgaaggcagcattgggagccatgcccccatccccacagtgcggggctagcaggagaggaggaggtagatctcattgtacacatccgtcttctggagagaacaacctctcctaccatcccttccttctacaccttctctgcctgtcataggtggctgcaggaggggtccacgttgggagggacaggtgagctggcctttggtgctgacacactcctgactttgccctttctcctgcagggggtgccattcccgcagaatgaggctaatgccatggatgtggtggtccagtttgccatccaccgcctaggcttccagccccaggacatcatcatctacgcctggtccatcggcggcttcactggtaccagcctccctcccatcccccactgtagacacattcatgaccacccagccccacccgggagaggtggggaaatggggtggggtggaggctcaaggaagaagagagaggaagtagaatctctgagtgggcctggaagaagctatcctatttgcatacacttcacctttccttcccctcttgtgcccagtcattaaaaggaaaagcagacccaggtcctgggtggggagatcagggaaagtgaatgtttcctgcccattatcttcagtgcactatctccagtgttctatccccatcctctccagatagttccctaaccaagtgaagtaggttaagaaaaaaacaagggataacatagggggaatggggttggcctatagggtcagtgggatgagagcatgggtggtggggagaaaggagcctttctcagttcttactcttcttccctgccctggtaccagccacgtgggcagccatgtcctacccagatgttagtgccatgatcctggatgcctcctttgatgacctggtgcccttggccttgaaggtcatgccagacagctggagtgagtgcagctcccaggcctgcccttcctgggaaggggtgggctggaactgggaactgttctgagatggctcccttttcttgggtggggagtaagtcgccccattgttggaagcaggaggactcctttgtctgggggcctcagttttctttctccgtgaatagtgaggacctttatgttgggcaagggctttgtctctgccatcccttcacctttatcccactctagggggcctggtgaccaggaccgtgaggcagcatctcaatctaaacaacgcggagcagctgtgcaggtgagggccggccagcgtccggcattgaacacctgccccccatacagctctgctgggcgctcaaaccctgaaactagtactaaagtgcaagttggtaaaaggccactggctcacatcctgagtgaccctgccaccacctcaactggcctaacccctcccaggtcccctgggactctggaccacctcaggatctggcaaccaaagggttaaggcctggcacggcaggggtctcccagcagggccagactgaaccatgccccttaaataatcccctctcacccctgagtgaagggctaggtcaagggctgtgctatagcaaggggagggtaagaatgctaccagtgcagggataggggtgggccagttgtcacccgtctccctctgagctctcccttcccactgctctgttctctgaagataccagggtcctgtactgctgatccggagaaccaaggatgagatcatcaccaccacgtgagtgcgtgggaatctcggccctcaggaaccccagagatggccaggaacttgtcccttctacctctgcccaccagaaacctgggtatctagacccttcctcctaacctccagcccctccagggtacattcttctcacccccagggttcctgaggacatcatgtccaaccgaggcaatgacctcctgctgaagctcctgcagcatcggtgagagccagggtgtgtgcgcgctgggggcagtgtacacacacagatactgataccagcacagggaaggagggaggaaggttcagggatggtgaatgaaaaaaaatcagccctgacctgtcctggcacttcctccgtaggtatccccgggtgatggcagaggagggtcttcgagtggtgaggcagtggttggaggcctcctcacagctggaggaaggtgagaagggatccagtgaggcttggggcgggggcccagcaaggtcaggttgctgactggctgtcatctctctccctgaccagcctcaatttatagccgatgggaggtggaagaggactggtgtctgtctgtcctccgctcctaccaggcagaacacgggcccgacttcccctggagcgtgggtaaggagctcctggggcaggagagagggtgggaagggcctaggaaggggatgaatacccagatgtgtggcctattttgagcgcctcctctctgcaggggaggacatgagtgcagatggacggcggcagctggctttgtttctggtgagctaaggagtgggaagtgggaagggttcttgaatggccagggctcacatagggggactggggataccctataagcattggaagtggcagcttttgtagagtgggtggtggatgcggaagtggagggtggggagggagtccagtggctgcccctcccaacagtgctctgtaccccacctgtcccacctcctttcctcaggctcggaagcatctgcacaactttgaggccactcactgcaccccactcccagcccagaacttccagatgccctggcacctctagggaccaactgggactcattatggaagaatggggtgagaggagacatgaggaaagaccctcttatttgtgattctctgtgttcatgttgctgtttatagtttgtggaaagtgggggaccatcccccttctcaccactgttcctcttgcacgtttcccctcattcatgtggctgtacttaaccttctccaacatacatcctgcattacatgaatggattattcctaataattaataaaaaggtattttttctactatcaggctaattgtataacttctcaagtgtccagggagccaggggcaggtagtggggagagcagaggccccaaagagctgggctttgggaaaccctaactctagacaatctagctaatctaacccttcccatctctgtgtccccctaggccttcagcccctaacctgagctttcctcaggcagcaggtccccaaacctccccggtccctgatgtgcctactgttatcacaactgtgcagcctccctggcccctcccgcctccttcttcagttcttcctgcatacaaccaccccaggagcccatggttgccccctcctgcttacggctcatgagctttctaggatccgatttcacctacccagtgcttctgctggtttccaggttcaacctgcatggtgttactagcagtacccccaattttcattgctcacctcttgttatcttggtgaagagtgaggaagggcctgctccccacgtcttatgcagcaaaccctgcacacccaccttgccatgtcatcaagtctctgtcctcacagcctttttgcagttcaacaaacacaggccctgccagggacggagggccaggtgccaaggactcatgtcttctcagagccatactttgccttttggacggctctgttaggagaagatgcttaggttgtacctgaggaaattggttccctataactgccatctatctctaactttggaccttgtggaacacagtgaataaatccctcttccacccattggtttgttgcctggcagttttttttatttttttggagatggagtcttactatgttgcccaggctggagtgcagtggcacaatctgagcttgctgcaacctccacctcccaggttcaagtgatcctccagcctcagcccctctagtagctgggattacaggtatgcgccaccatacccagttgatttttgtatttttagtgaagatgaggtttcgccatgttggccaagttggtctcgaactcctgacctcaggtgatccaaccgccttggcttcccaaagtgttggggattaaaggtgtgagccactgcgcctggccgctggccactttcttcatttggaaacttctcttttccagatgaaagaccccaaagtttatcgccctgagtccatttttgttttgttttattttgttggggatggttttttgtttgttttttgagatggattctcactctgtcgcctaggctggagtgcagtggcacgatctcagctcattgcaacctctgcctcccaagttcaagcgattctcctgtctcagcctcccaagtagctgggattacaggtgtgtgccactacacacagctgatttttcgtattttagtagagacaggtttcaccatgttgcccaggctggtctcaaactcctgagctcaggcaatccacccacctcagccgactccattctttttttttttttttttttgagacggagtctcgctctgtcacccaggctggagtgcagtggcacaatctcggctcactgcaagctccgcctcctgggttcacgccattctcctgcctcagcctccctagtacctgggactacaggcgcctgccaccacgcctggctaattttttgtattcttagtagagacggggtttcactgtgttagccaggatggtctcgatctcctgacctcgtgatccacccgcctctgcctcccaaagtgctgggattacaggcgtgagccaccgcgcccggccaactccattcttttgagcaagatacttaacgtgggcgacaatgttctaatgtcctagatggagtctctggctaaatttctgtgtcttctccaaacccagtgcatgaagctcttcttgaaaccccagggcagaggctgtgtgtgcccccattagcgctgcaactccttaagggaagatatactgagtctccactggaagtggagatctgagacttaatcaggtgatgtgatgcctgaaatttggagttagaagaggcaggtgaccacagctccataatgctccaccgttagcaaacaggtggatagctgatactggtgccctctcctctatcccattccaggggggcaaacgatgggaagtgtggaacatgaagctctggagccagctgcacagttctgaatcccatcctcccagatccaacagaagagttaatcccctgaaaactaaatttttgttcagctaagggaagctccttaaatgcaaagaggagctgggcatggtggctcacatctgtaatcccagcactttgggaggctggggcaggaggatcacttgagcctagaagttcaagactggacagggcaacatagggagactccatcagtacaaaaaatttaaaaattacccaggcatggtggcatgcacccgtgttccaagctactctggaggctgaggtaagaggatcgcttggctgaggatcacggtaggttgaggctgcagtgagctgtgatcgtgccaccggactccagcttgggtgacagagtgagactctgtctcaaaaaaaaaaaaaaaaagcaaataggggtgcccagtctcacctcccataccctggggacaaaggacacccctccctggacatggccattagggactctgctgaactgcccctactgccactttcccccatcttactgcatgtaattgtagacaacagtggatgacctgaggggcccttagatacctgaaattgggtagggaaagaaaggtaggctcaacatgtgaattctgaacccccccatccaggggcctcagcctacttcagattactccctatgcaataaggttcagagcagctgtgtttgttttcagaactaatccccacccaggggtggaagcaggcccctgtccactcctcaccctatatagcaaagttccagcagttccaggggatgatcagcagagatgcagaccttcccagttgctggggcgctggaccctgctatactggacacaaggtgaggcctgaaagtccaggcaccctgaggagctgggcaaactagcagaaaagatggcgctgggagaaaggaaagttagactctggacgggaaatctggaaagaagtggttcccagctgggccaaaaagcctcatcctacgccgtctcatcgacctgggctccaccctgagtgcctccagtgtgaggtgctggactggctctgtgctgcctgtttgggttgagggtttgctcctaggagaggcatgtatttctcgtacagctgtcacaagcgagtgagggctccggaggtggagggcccaagagggtggggagctcaggcgtcagtgatagccagatttccatccatcggtccgtccgtccgtccatccatccatccatctatccaatcaacaagccattccggattcttcaggaatccagtcattcatttatatttaggttaaagaccctctctctggttcctctctagaacgcaatctcgagccgctcccccaacaaaccgtggccctctcccgaccgggtcatctacagccccgcccctcgtttgcctggctccattcccctaaccttggcgttctgtcctcaggccccgccttctttgtttcgtcactcggttgcttaccctcaggtatcccttaactctaggtaggagcactcagaagggacaccgtcatctgctgctgtcgccatggcgattattcaacgccctgcctcttcaccccaggaaaaccttcgcggaacccgtcaccatggaaacgaactctctggactcttagcgcgccctgggctggccctgctgggtggacaggagaggagcaaaacgcaacaaagacgggattaattactcggaggccgcgccccctccgaagaaggccccaccctgccccggcctcacccctccccgaaataattcgaggaaatattccgcgaatgctgggtgggtgtcttgccccccggttccctcaaggcccacggtcgcttgaattccacagcaagtcctcccggacctctcagggcaatcccctcccgaagcccagcctcagcctcgcaaagcctctagtcgttggccttttcgttgcgattatattcgagagggagcttcagagggcgccgcgaagttcccctgtgcttcccctttgccctttgccctcttcgcttcaagaggagcccctggctctcttttttttttttttttttttttttttgagacggagtcttgctctgtcgccaagctggagtgcagtggcgcgatctcggctcactgcaacctccgtctcccgggttcaagcgattctcctgcctcagcctcctgagtagctgggactacaggcaggcgccaccactcctggctaatttttgtatgtttagtagagacggggtttcaccatattgtccaggatggtctcgatctcttaaccttgtgatccgcccagctcggcctcccaaagtgctgggattacaggcgtgagccacggagcccggccctctgattctttttgtctatcactctgtgcactcattcattcaagacatttatgtaggtgccccgcgttcctctgcagttctccactactctggcttttctctaatacaatttattttgtgttattatttctttaagacagagtctcactctgtcgcccaggctggagtgcagtggtgcgatctcggctcactgcaacctctgcctcccaggttcaagagattctcctgcctcagcctcccgagtagccaggactacaggcgtgcgccaccacacctggctaatgtttttgtattttttgatagagacggggtttcaccatgttgctcaggctggttgcgaactcctgacctcgaatgatcccccaccttggcctcccaaagtgctgggattacaggcatgagccgccacgcccggctaatttttggtatttgtagtagaaacggggtttcaccatgttagccaggctgggtgcgaactcctgacctcaggtagtccacccgccttggcctcccaaagtgctgggattacaggcgtgagccaccgcagtccggccctaatatagtttttaaattcattcattccaaggcttttgggaggcgctcagtggcgtgcagtttcctctcgaatttctttcttcccgcagtctttctgggcgggcgtctcccgtctgtttcttcccatcttcccccttatcatcctgggactggataattcttgaatagtctgggaggtagcagggaacccgagttcggagcctcgaccagaacctccagacgggaaattggagcaggtggtgtcgttccaggacgctgaggaccacctcctcccctaacgcacagcccaacgatcctaaaagtaaaaaccctgagtttctgagtcaagactgagctggtggggtggggaccgagtaggcgtggatggggagcccagcgggtccccagcggagaaaatgggtgagacgcctggggccgcggtctccagaattcgcctgggagggagagtggcgctacggcgccgccttcctggggagccgcttcgggctccggatgtccgctggggcccgacgcttgggtcccgacgcgcggttcgcactttccaggtttcttccccagggaacagagcttgagcggggggccacccccccgtcctaccggagttctgaggtgcggtcaggcgcggagagcggacgcccagcgccagattctgtgggctccggagttcaggcccactgagccgcagctgagcacaggcggggcaggaaaaaggatgaggtgagggaaggcgctgggttcctggaaccccaagggagcactgagctgagtacgtatcgcttgggatccaggtgtccttgttttaggatgtctgacaggtgtccccagggtatgagaagtgggactgggcaccccctatttgcttttttttttttttttttgagacagaccacatgtttcctatcttggaaaatggtaccacttccttgtgcaagcctacccctgttccctcacccctcgttcagtccaacagcaaatctgtccagtcttctaactgtatctcaggttcattagccccgcttcctcgtccctgctcgtcttctgccggaccagtccgccatcttgtgaccggactcgggaatagcgtcctacttcccggcggcctccactcttgacccaaatgcaatgtgcagccatggcaatcttttataaacagaaatccgatcaagttactcctctgccgaaatccctctggtcagtggtttaactgtcgaggtgctcctggcagcactctgccctccccacatcattgctggtggacttgtctcccctactagactgtgccctgtgagggtggagactttgtgcagggttgtatccccagcatctgatgcagtgattcaataaacatctgtccaattaataggaaagacagttccttttctcattcccctattgctggtcccctgccctcaagcaggatgttatgccccagagtggctgtgggtgcgaacattctgcccctctggctggtctggcactgatttccaccctgagctggtgttgcctctctccttcctcttggccaacctctcttccaccaatataagcccaaactggaggccagcaggcagtcatgcgttttatggcaggccctgcagggagccagagtctgggtcccctgtgcttccacagcagcccccaagccctctacacggtcctcttaatagtgctggtcatgatgagcttggtgtttggtaagtggctccaagggttcagaagggtctcctggcctggatggagaaacccacagacaccaagtgtctgggtacacctgtccaggatgctcaggtaaacccatgcaggaggagagatgggacagatgggtttggtagggaatgcctgctcatggactgatgtgcaatctgaagatttttaaaaatttattattattattatttttgagatggagtctcgctctgtatcccaggccggagtgcagtggcgagatctcggctcactgcaacctccacctcccgggttcaagcgattctcatgcctcagcctcccgaataactgggattacaggcataagccaccaagcccagctaatttttgtatatttagtagagacggggtttcaccatgttggccaggctggtctcgaactcctgacctcaggtacctgcccgccttggcctcccaaagtgctgggattacaggcgtgagccaccgcacccagcctctgaaggagatttctagtgaccaccccagggctgtctcacttcacagcagtgacctgaatagagatactgaaggaatcctctctggatctgagggcaacatagaatagggagggttagggagtgtgctggatgagaaaaccagaatccacaggatagaacaagactgagtccagcctgctgggctccccacttggctgcaaagcaccagccacagagacacaggattcaaagtgttggtttagcactttcctctgcctaacaccaagtgctctgctgggtctggggatttgttaacatgtggtctggccttaggaccagaggaaaagggggatgtatgtgtatgcagttggggaaggaagcagagaattggggctttgatggttttctgagacaggaagggagggaggagtggggctgagtggcctggaatcaggcagtggtagggtgtgaggtagaatggggtgtgagtggggtcagcacttctctgtgttctaggtaagtttgttcctgtcaattgggaaccccctcaaccacttccattccccaaatacctgcgctgctaccgatgcctcttggagaccaaggagttagggtgccttctgggatctgacatctgcctcaccccagctggcagcagctgcatcactctccacaaaaagaacagtaagtggccttctcctgtcatgggcccagcactctcccaaacggaaactctctcagcctcctaagctgcaccccaagtcttgttcccataatcccataagacattgctccaatcctgtctttttttttttgctgctctgtcacccaggctggagtgcagtggcgcaatcttggctcactgcaacctccacctctccagttcaagcaattcttgtgcctcagtctcccaagcagctgggattaaaggtgcacgccaccacgcccagctaattttttgtatttttagtagagatggggattcaccatgttggccaggctggtctcgaactcctgacctcaggtgatccacccaccttagcttcccagagtgctgggattacaggcgtgagccaccgtgcccagcctctcttcccttttcttcagagccacactctgtctccacttccactaaccttctctcctcaatctgtagctgaatagcttctaccctatcaaggtgcgcagctttgacggggaccctccagatctccaggtgcccttgcctgtcctcaagctgtctgcttccgcatctgtctgcagttactgctggtgttgctcttctcctgcatcctccacggcttcttcagtctccttcatggagcgttttctctctgacccttagtggttcatgttcaccaaggtttggtccttagctgtcttcccacttcatatactcaaaagcagaggattttatctgctttgctggcttcaaccagcagccacataccacttccttctgaatctgaatgttatgtcaaaccgctctcctcatatcccgttgaccactggacatctccctcgctgaaaattgactccttcccgatgcctgctcttccaccgaccccccacctttcttaagttagcaaaaacgtaacacataatatgtgctaggcactgttctaaacacttgcaatccgctgaggcaggtattattactatgtgcattttacagatgaggaaacaggtgcagaaaggtcataaccttgcctgagtctcacagatgctgagccagaatttgtgatggctccagagatggtgctctcaacaaccactgcatgcagctgcctgtgttcaagtcctcttactacccttttaacatagccgatgcacagatgtgggtcaaatatcagagtatacaataccatcaaaccaaagtctcccgctactaccctaacccacctggctcccctgcacatgtgaccactttttttactttctggatgatccctcctgcaatcttttatgcacattccaccctgcacaaatatgctgtttactattttttcacctcttcccccgccccaacccaagatagtagcatcccactgtaaacattattccacatttaagttaggggaactgaatgttccgatatcagtttgtaaacagcttccttgttttattgacctgctgtatactactccatagcatgcgcatatcacagctgatttccccatcccactattgatgggcattttggtcatttctctcaagcagggcagcagcaaacatccctgaacatgacttcttgggatgcaggcacaaagatttttctctattatgtataacagcagcagacatcatcttattctcttttggtctgaaaaataaataacaatacacctccttcctgccacccaatctccaaaacatttcccagctttttctcacatggtcctatggtgctagttctcctcacttggctcagtaactcccaactccccctccaaccattacatttcatatggctcttttcctccagccttgcatgggaacttcagtggagttccatggctggtgaacactgggcatgtccacccatgcctaactacaggaatcttttctttttcttttttttttgacttatgagtgtggggatgagaggatttggggctcttcctggggacttccgtatcactggtgcccactgtccctccccaggcagcggttctgacgtcatggtgagtgactgccgaagtaaggagcagatgagtgattgttcaaatacccgaacttctccggtgtctggcttctggatattctctcaatactgcttcctggatttctgcaatgaccctcaaaacagagggctctatactccttagtgtgactgcagcaaactttggtgtaaaattccaccagtttccagccaccttcctgacttctatctgggcttggccaggacttctagtccctcataccagccctccttgcctccctccagccactggaccccagccttggctcttcctcttggttgacgcccttcagcacacttactgctactctgtacccccagccctactgcccaccaggtttcctctcttgtcccctagtccctggatgtttctcccaaataaatttgtgtgtaaactgtttggtatgtctctttcttctggtggaggtgaaggctgagggaggtgcacctgcctaactgccctaccatgggtcaggtaagggacccccagctctgctgagctgtcctcttgtcctgccttggtatgtgatttgctctagacacaaaaagagaaagaggaaatgaaagccctcctatggtgaatgccagaaagttagtgggcatcctcggcagtgctgtcagaccagagctgtgtgggggctaggggcgtttagagggctatgttggtgggaagggggctgcgaaaggaccaggcccaggtagaaggaggtgggtgagaaggccactctttttttgagacagtctcactgtcacctaggctggagtgcagtggtgtgatcttggctcattgcaacttctgcctcccaggttcaagtgattcttctgcctcagcctcccgagtagctgggattacaagcacatgccaccacacctggctaatttttatattttattagtagagacggggtttcaccagttggccaggctggtctcgaactcctgacttcaagtgatctgcctgcgttggcctcccaaagggctgggattacaggcgtgagtcaccccgagccgagaaggccactctcaaagagatgttagaccttattggagtcctggtctcttcaattctgggccaagttcttcagcctctgagggtgtcttccaggttgacctgctataaacctgggcctttctctgtcttatactgacgtcagaggtcatggagaagggtggacttagcaaggtgggggttggggggcacattaagggtttgtacctctctttgtacgccaactgcctcatgacttaattatcattggtttggtattttccgtcagagtacaggccacacagatttgttaacacgtgtgcaaaacactatataggtaaaagcagatgcgtacgatgccatttccatcaagcacagacagaactcatctaagctactaccagtcaggacagcggctaccccagagctgggaagagcacctgggagaggggaacagaggcaggcttggctgcaggtaaaggtcttcacgctgatttggtggctggttacacagatgtgtggtttacaaaaatccatcttgtgatatgtgcaagcttctgaatgttttaccaaaaaggtttgaaaataagtaaatcagccaggtgagcatggtggtgtgcatctgtagtcccagctacttggaggctgaggcagaagaatctcttgagcccaggagttcaaggccagcttgggcaacatagtaagaaccttagaaaaaaaagctgaacattgtgtatgcatttgactctagggcaaatatatttttttgagggggaaaaggccttaacttctacttgtgtatgcacatttacatgtgttttctcaatcatctgaggcactatccctacttgacaggtgaccaaggtggggctgaagagactgacatatccaagtggtagaggggctgggattggacctcccagccacaaagctgcactgcttttcagaaaaaggtttcataacccaagcactgggctgcaagacttggaagggcagacacctggctatactcatctgggagtcctgctgctcaataccaagcctgactcagagcagcgttatgtccagcatgtttatccagtgtatggaaaaggctgttgtatccatccttgctttctatacgtttgcactatttcaaaattaaaatattagcatgaagatccaaccactgcagcccaacatcagtgctctcagcactttgcccctcaaattgggcccctcgagagggcatcctggatgccagaatccttgaaaagaactaaggaatggcaggagtccagggccccagcagcaggtaactctggcatgtggctctgagttcctgagtctttctggtttaaagagaaagtttctttttttttttttttggagacagtctcggtctgtcacccaggctggagtacagtggcacgatctcggctcactgcaaactctgcctcccaggttcaagcgattctcctgcctcagcctcctgagtagctgggatcacagacacgtgccaccatgcccaactaatttttttttttttttttttagtagagatgggctttcaccatgttggtcaggctggtgtcgaactcctgacctcatgatccgcctgcttcggcctcccaaagtgctgggattacaggcaagccaccgcgcccaggcttttttttttttttttaagacagagtttcgctcttgttgccctgtctggagtgcaatggcgtgatctcagctcactgcaacctacacctccccggttcaagcaattctcctgcctcagcctcccaagtagctgggattacaagcatgagccaccatgcccagctaatttttcatatttagtagagacaagatttcaccatgttggtcaggctggtctcaaacccgacctcaggtgatccacccacctcggcctcccaaagttcagggattacaagcatgagccaccgcacctggcctaaagtttcttttcttaggtgaaaagacctggcatcatcagggtctaactttccaggttttgtagggtatgtttaaggctgggaagaatcacagtccccatgctttgatctccagctaagcagagggtggggagggatgtgtgccctttacaggaggccgagaggaagcgacaaacgccaagtgcaatggagagggctctgcaatcctatttggatcccaaacctcactaacccttttttttttttttttttttgagacacagtttcactcttgttgcccaggctggagtgcaatggtgcaatctcggctcatcgccacctccaccttccaggttcaagtgattctccggcctcagcctcccgagtagctgtaattacaggtatgcgctaccaagcccggctaattttgtatttttagtagcgatggggtttctccatattagtcaggctggtctcaaactcccaatctcaggtgatccgcctgcctcagcctcccaaagtgctgggattacaggcgtgagccactgcgccaggcattaaccctctttaatctgtgtttacctgcccacacctgagcctgaccccacaaacaatgtgacacagttttagcccagtcccagtttattgtggaggaaaatgggggacatggagctgagcagaacagacccttccctctcctctcacaggcccctagggagatgggtgtcaggactcagtgaagtgaaatggggccgaggaagccagagactgacaagagagcaagagaggacaggaggcagaacaacactaggacaggcgggggttggtggagacagtgaggcagggacacaaaattgccaagtcaggacatctgcacagaattctattcctcatccttttttttggagacggagtctcactgtgtcacccaggctggagtgcagtggcgcgatctcggctcactgcaacctctgcctcccgggttcaagtgattctcctgtctcagcctcctgagtagctgggattacagaggtgtgccaccacacccagctgatttttctatttttaatagagagcgggttttaccatgttggccaggctggtctcaaactcccaatctcaagtgatccgcccacctcggcctcccaaagtgctgggattaccggcgtgagccaccatgcccggcctcctcgtccttcttgctgctagttcagtctggtactgggtcttagagacatggacaagacaggggaaacagagctagatgtcaataggcaggtgactggattgagagggatgggggatactggaacactcagatgatggggaaggaatggaggaaccactgtgcctttctcaggtcagcctgtctgggcagaatccacactagagattcttttctagggggaagaacagcaccagagctcagacaggcacagtggctcacacctgtaatcccggcactttgggaggtcgaggagggcagattacgaggtcaggagttcgagaccagcctgaccaacatggtgaaaccccgtctctactaaaaatacaaaaaattagccaggcgtggtggtgcacgcctgtagtcccagctactcgggaggctgaggcaggagaatcgctggaacccgggaggtggaggttgtagtgagcagagatcatgccactgcactccaccctgggtgacagagcgagactttgtctcaaacaaacaaaaaaacagcaccagagttcaagagagaaaattacacaaaagtcatatagatgctagtggtacaacagacggaggcctaagaaatcacagtgaccaaagaatgtgggtgttttcagagagggcagtgcaggatgctgagggtgttacagaaagatatttgcactgtggaattcaggaagggtgaggtgtcaagagtccagcctggggaagaaccaaaagtcctgaactattgaggaacaagtacatgcggcgcagctcagcaaaagacaagcccaggttcagggacagtgtgaccatggggtccaggccatcaggctccgtcccagcatggaaattggggaggggcagggagaggttcagggcctggtagaaccactgaatctgggagtcagacagaggcagggccaggggcctgtcatggggctccggcagagagctctggagttgggggcttgaccaggagttgcaataatcgtactgacagcactgggcctgataccagtactctgcaaagtaggtgttgcgtttttcttggcagcggtaggaaatgtactgtccacagcctcgaacgatgaagcgaaccttgacatctgagggagaggggaaagctgataaccccttccaatagcttcccatagtccaagaacccctgctactgacttttcccatccttcacccagacctaatttacttctaacccagagtccttcaagaggctagaaaagtgagctctgctggccccctagaaccttagacccctccttccaagattcttctggttttttttgagacagggtctagctctgttactcaggctggagcatggtggcgcaatcttggctcactgcaacctatgcctcctgagtttaagagatctcccacctcagcctcccgagtagctgggactacaggtgcataccaccatgcctggctatttttttgtagagacagggtctcactatgttgcctaggctggtcttgaactctagagcttaagtgatccacctgcctcagcctcccaaagtgctagggttacaggcatgagccattgcactcagcccctcctctcttcttgtaccccatgcccggagcagccctgatctgtgagaggagagaagaccaagccattggctgccccaccagcagccccttcctgggaccttatttaccataatagatggtgatcaccatgcacagggatgagctgctgatggtacacttctctgagcctgaaatgcatcctacagaagggtcttctacgaggcagaagtggcacgtccggatgtcgggaacaggaactggggaggcagaaggagggatggaggcactgggtcactctcaaataccctgggccagtaggaagcccgattatccatggccacgctccacccccttcctggactcagttaccccttcctccctccctgcccctgggccccacttaccctttcctactgtgaagcccaccatgaccagcacacctacaagcatatggaccttcattttggaattctggggagatgggcagttcctgaggggatgccctgaaaccccaccttcctgtgaccatgctccttaatcctaagctgcagggtggttttgacaaggtctgagcaggagctgctgtaaatgcagagctatattcctacttggggcaggatcctggctgggaaggaagttattacttggcaggagggacagcatgtcctcacccacaacgtctggttcctgagtgtgggagtaatggcccagatggggtaatacctgggcactaccgggttctttatccagtgtctacctttgtcttgcataccctccaaagacctattccctcccttggaaagtccatgggttagtatctatctctgccaccatgtgctgtcttcgtcatacaacagggccaatccccactgtgctgggacaacctggccaggaaatcaagcatccccatccttctgagatgagcagtctcagctccaccagcggcaggcacacacacatcactgagcagcaattccggaccttgtcccacctcgttccaccctttagttatactgactttaggctacttttcctttagaactaaaactaaaagatggagctgctgattaagccccttacagtataaacagacagtcatagatatccaaacaaatatttctcatctttgaaatatgctttgtcttttccttttgaccttgcatttcatcacacgcagtcctaggaattctgttctgctccatactaaaaacaccacccaatccactgagcacaaatctgtcctggttttcaatctggggagggtgggctgggccatgagggcccctggagtccaacacaccatcaccttcccttccccaacagcaagcaccagcagactagctcatggccttttcttctactttatttcatattcccaccacgataacgactcctttaatttaaactaaaaaccatacagggttcctgaaagggtggcaaaaaagaaaggaaaagtcaaagactgcaggacaggtgggggagggaatcagcgaatcgtcttgactgggctcttgaagttgctggcggcttggagctgcagctggtaggccatcggatggatcttgaaaccgtagagcctaggccagggcagaggtcagagaggcagcagcatgagccccatccaggccctgccagtcacctgcattcccacctccccacctgagctcctctatggacctgctcagagctaaagcctcgtggttcccaacttctcagctcaagaacattctacaataaggtaactcaagcacagataatcaaataactttcccacagtcactcagcagggagatgccctgattctgggagaagcagacctcaagaaagggccatgccctgtcctcccctctctgggggatcttgggcctttcctttgacccttaatgactctccctgctccctacctgggcacaaactggttggcaggtctcttgggccggtactcgggatgcaccatgaagagcatgtgagggaaaccagtgccgaagtaggcgccatccgtgtgatggtgtcttgatgacttgggtgtgtacacatccatgcacttggggcagtagagcttcaccatggcttcacctgggatgtctgaaaggcctgggagacagccagactcagcaggccaggtatccccctattcctacctaacctcccctcaggactcaggctccaatgtgttgagccccaactccttcccataagactgccacacggtgctttcctttcccttcttcaacactcaccaatgggaagcattggctggttctcacagtacacacgaggacagtaaccaaagtctccttgctggtacttttccaactgaggtgaatacaatggaaggggttggcaggtagatgtaaagaagaggcaactcccttcgcagcccaacccataccactctgtcccccactcctcccacctctgtccagaggccccttctctggactagatgggctctcaaacttctgtgttgcctttcttccaattaggcaggctacaaaccatcagagccatttgttgtttgttccttgaggaagaggcagtctatcacaactctctgattcaaggtctgtctccctccctgaaaacaatcccttcaggatgacccccaatcagaattcaattcccaggcccaagttctggggttcttcccctcttctcagctagcttccttaaacagggcttaaacatgacttcttgctgcaggaacctgtgtctcttactgctcagaaggaggcaggtaggagcagagaggcctcaccatctgggcgatgccacggttggtaaggatgtagcgggcgtggatcaatccataaagcatctcggctgcctgctcaatcaggtcactctggttggggttgtcttccagttcttcatctgaaacacagcccggccaaatgcaactacttgtttttcagctttcctaggtgccctgcccatatccaggggctgcgggctattcagtttgcctagcacctacttttgggccttaccccatccaacatctgggcatgggacccagaaacctgggcttctgacccttgcatcaaacgaagacagctctgccttcccttcacaccttttcagcctctgctccttgctctccctcccaactccctcctcaatacataactgcaacaatgtcaatgcagaagatgaaattctagactggaaggtgcaaagcaggagaaacagacaacaaaccagacccatgaggaaacgcattttggaataggtctgaattgcggatttagaaaacatgagaacaagtgatatacgtcacaaaactagacaagagtcaggtggaggatcaaaataaagcatgaatttggggttaaagaaatcagagaaccaaaggaaatttcaaaattcaggcaagtgaatagagatttgaagagaaaaatagtgcacgcacacacacaaaacaaccctgagggtgcctcaccaggctccaggtccaagatcatgtctagagcttgtcgatagtgagggacctgctcattgagtccagtaagattaaatttgtcctggatgtagtcttcatccacctgtcaggacatggaagccaagagggaacccatatcaaaatcctcatctttgacctgggcaaaatgctctaagtgatgccttatcatcaacacaactgcatctgttgtgcttgtttctcactcccaactcagcagaagtacttgtgtctctccctagttcacctacactctctcccataaaagctttggcttttcttttctaaggataagtagatacagcaatctttttcttagacattcttttcaagatctttgtccctactccactcctgtatcccgtctctaggaaccagttttgtcctctcagctggctaaggaaggtggaagctgaacagcatggtttctgaacaaaacatttcaatgtgtagcatttcagttttcctaaaggccacctgagacaagtactagcagtgccactttagtaacaaaagatacaggccgggcgcaatggctcacgcctgtaatcccagcactttgggaggccgaggcaggcagatcacctgaggtctggagttcgagaccagcctggccaacatagtgaaaccctgtctctactaaaaatacaaaaattagccaggcatggtggcaggcacttgtaatcccagctacttgggaggctggagcaggagaatcgcttgaacctgggaggcagaggtggcagtaagccgagatcgcaccactaccctccagcctcggtgacagagtgagacccagtctcaaaaaaaagaaaaagacacaaattgactagcccaacgttatattgctggacggtggcagactcaggacttgggccccagttttgccactttagcacaggttcgtcggggtttataggggggactctttgctgataggaagttttcaaatagcatgtaagagaacagtgcagaagtggaatatgtgaaggaacgtctggtgggaagatatgtgaagctggcaagtagggaggttgaagagaactcacttcacagaagaattcattgccacggagcccacagaaccaggaaatccaggacacctcctctgagctgctcatcttcacgtcagctagaaaaagaacagtgtcagtaaagctcaagttctccttccctgcctctggtatcctccctcctcccacattcggccctccaaccacgggagaattcggaaccaccctttcttaaagcaacccaaactctgaagcactcctctccagctcctctaatttacatctcagccccttttctttgaagttaaacattctttggggtcccaccacttgaaagaagccaacagatactttgacccaccagcccgacccacatccctggagctcccgaaggccagggccctctctcctctgtgtcaactccggcagggacctcgactcaggctccctaccaatacaagtctctgcatgacccccacgcctttcccaagggtttccaagtttatcattctcaagcaagaactgggctcctccttttctcacgggttgggggcgattgtcaggtccctttcaccggaatccacacatcccccctccgctcctcaggccacctctccctccttcgtgccggacctggtcgcttcctcccccgcccccacatcaaagtccggagaccccatgtgccgctcccagcgacaagggactcggagcagcgacgacttcagactcaccggctggacggggaccaggactggggtggggtagggaagttgctacttccagggaacggcggcgaccgctacagcgcaggccgcggacccgaccgcggcaggcgaagtggggtggggggagtggaaattagggagggtggggaagagggcaacacgcaagcgccaagggtcaggtgccgcggtggatgccgggacacggagtccccggtagagaaagaaactggctaaatgagagaaagcgaactaccaatcccaggatgacccgcgcacgacctggctgtcacgaaggcccggaggagggcgcttgcgggcggggcacaacgagaagccaccggaagcggaagccaggtatggcgttcggggcccgggagtctgggcaatacagttttgtgctcactgggtgaagaggctgacttagggcggggaaaggagggagccaggctggatctctttccgcagctctcctcacgttcccctctagtcccggcgcggcgctgctgcccaggggactggcctatcctcggccaatccgctgggtccttattgcctgttgggcccctagtgcgaatcagtcccgccagagacccttgacgggcatactgtttcctccgggctcctgcctcatgaggggagaggtgcggcttggctccgtgcgtagggacttgggtggggtggggtgggcggtgtgagaactggaacgtcccagtgcgctaacctgaggtggtgccagccattctgctcgtccctttgcacttctccatttccccttaggctctaagtgtgaccttcgaaccctggtcagagtaatggtgaggggcaggcgtgacgttatttcattacacggcttctcggcattccacaggtttccctccgcctcctgagggcctttcctaacccacagagtggattcctggctccagaaaatgggcttggagcgggggccacgttgaggaaggcgaagggcattgtgggggcgttatgtaaaagtaggaccccaaccgacagatcctagtgctcgcgccacctgggcgcgcggagctttgctcgtttactattgaaaaagttccagcgcgggaaactgaacccggagctttgcgcacgcccgagccctcaagtaatgtgggttgtggtttttgttgttgttgtcgccacgcatgcgtcttcgtgccgtgtggctatttgattgtgtcaactcttctgattagaatggcgccattttgcggtacggaagctacacagcaacacgtataggagactctccccgagatcttctagggagtgacccatctatttttgtttgggaagaggaaactccgaaatgggatcgcggaagacttaaagggccaggctgatttttttttcctactggtatgtcttacggggtgggaaagtggtttcagaaagaggctggtgtttattgttggtgaggatgggggtgggggccggacgcaggacctctggacaacagtctcatggagttttattaatctttactaaggagcaaagtcggtattgtagggttccatgtttttacgcaaagtctctctcccttaggccctgcagagtcctaagttgtggggttactttagtggcaggaaagtgtttttgactactttttctcatcccagcaggtctctgaggctgtggttgctacagggtcaccacgagcttggcttacttgtctcatccttcccttgcctggtatcattttctcagttctcccaaaagccatgtcccggcccttgctcatcaccttcaccccagccactgaccccagcgacctctggaaggatgggcagcagcagccacagcccgagaagccagagtccaccctggatggggctgcagcccgagctttctatgaggccctgattggggatgagagcagcgctcctgactcccagagatctcagactgaacctgccagagaaagaaagagaaagaaaagaagaataatgaaggcaccagcagcagaagcagtggcagaaggagcatcaggaagacatggacaagggagatcccttgaggctgaggataagatgactcaccggatactgagggcagcccaggagggggacctgccagaacttaggagactgctggaaccgcatgaggcaggaggagctggggggaatatcaacgcccgggatgccttctggtggaccccactgatgtgtgctgctcgagcgggccagggggcagctgtgagctatctcctgggccgtggggctgcctgggtgggggtctgtgagctgagtggcagggatgcggctcagctcgctgaagaagctggcttccctgaggtagcccgcatggtcagggagagccatggagagacaaggagcccggaaaaccggtaaggggaaactttagctcagacccatgtctcattgtgttctgcctctcccagccacaccacaccagacgccccagcacagtgctgaagagttctttccttatcctcatgtgtaggttgacagggtagtatagtcaagtggttataaacatgagctccctggatttaaagcctgattccacttacttgggcaaacaacctaatgtctacatgttccagttttctcatcttagaaatgggggtagtaagaattgttgttaggattcaatgggttaatatatgtaaaatgctagaatagtgcatgccgcatagtatgcaatacatgaatgttagctatagtcattatgactaatgtccctccccttgcccaagagtttgctaggtctggttaccatttttttctttcaactattctgctctggatcccacaatggtttaaagaaatttgtttttaagacaagtcaagtgcagtagtgagaaggaggggaaaagtggagtaaggagtttgatctgtaactgagtgaacaattaattcagataactcaccaccacctttggaccagcctggatccctcactgttaagtaggaaggaaggcaatttgtcccttttttttttttttttttttttgagacaaagtctcactcatctcactctgtcgcccaggctggtgtgcaatggtgtgatttcagctcactgcaacctccgcttcctgggctcaagcatattttttgtagaaagcaggctttgccgggacatggtggcatgtgcctgtaatcccggctacttgggaggctgaggcaggagaatcgctaaggtggaagttgcagtgagccaggatcatggcactgcactccaacctgggcagcagagcaagactccatctcaaaaaaaaaaaaaaaaaaagcaggcgttgccattttgcccaggctggtctcaaactcctgagctcaaagccatctgcccgcctctgcctcccaaagtgttgggattacaggcgtgagccactatgcctagctggcaatttgttccttagcagaaaagctgaaaagatcctattctaccctgccagccccctctgaggcctcaactcttccccttttccttcccctgcccttaatgctttttcttctttctctgcaggtctcctactccctccctccagtactgcgagaactgtgacacccacttccaagattccaaccaccgcacatccactgctcacctgctgtcactgtcgcagggtcctcagcctcccaaccttccacttggggtgcccatctccagcccgggcttcaaactgctgctgagggggggctgggagccaggaatggggctgggaccccggggtgagggccgtgccaatcccatccccactgtcctcaagagggaccaggaaggactaggctacagatcagcaccccagccccgagtgacacatttcccagcttgggatacccgagctgtggctgggagggagagaccccctcgggtggccacactgagctggagggaggagagaaggagggaggagaaagacagggcttgggagcgggatctaaggacttacatgaacctcgagttctgactttggtaaagtctgaccctagtctgctgctgaagtctgaacttgggcctctgacctgggccctttgacttccccttcctgggatctgctcagatgcagatcctgaagtttttggtcaataggctctgtcttcgtgagagacgggctgagagtcagaaataaatcaaccatttgtggtttattcacttttctggaagctattttgaggaagccaaacagaagcctgggagccacatgcaagtcccacctgagtcagaaggggcagcctctccaggtggcatgataaggtcacctccctgccaatctgggttcactttcaggtcccagaccctcctgggagtcccccacctattctttcaacccccctggaccaagaattgcccagcttcgtgcaagtctcacttcccccaggaggagttccctgactacagccaattcactgatttcacaaacataagtccatatactatgtgccaagaatacaggtaaagacattcccaaccctcaaagagttcacagctggagagggaaagtgccatgttatcaatttttttcttttttttttgagatgcagtttcgctctcattgcccaggctggagtgcaatggcatgatctcggctcaccacaacctctgccccccgagttcaagggattctcctgcctcagcctccccagtagctgggattacaggcatgccccaccacgcccagctaattttgtatttttagtagagacggggtttctccatgttggccaagctggtcttgaactcccgacctcaggtgatccgccggcctcggcttcccaaagtgctggggttgcaggcatgagccaccactcccggcccatgttatcaaatattataatgcagggtgataagggaagtcaaggcctctagagatgagaatgggtagggttttgctggaagaggccagtgtgataggaaggcccacgattatcaagcttgtacacttagttgaactgggaccagaactctagcccccaaatctaaactttaaacttctttgttccacccatttgtctacacttttctttcccacacttccccactctcccaccacccacccccttgtcttgctcatgccgggtggtaggcacaagaagagctcactgttgtgaaatccaggaattcaaatttgcagacgggcaggggagggctgttcaagtcgcaagactcctcattttttcttttctgggaaagcctttcatgaagtcttggatgcgaaatggaggagtggtgggggatgtggaaaagaacccaggggcagggggctgtagggggcgaccgagtttagggaagcatgagaaacccgggaaaatggggagctgggtttatattaaggtcctggtccttgctaatctcggtttggcggtccggcgcgcacagacagcgcggggtatacgggggcggtctattcgcagggtccgccccatgagctgcggcaccgcccccgcgggtccttccagtcctggtgcagctgcttccgggcttcgcggctcccggcggctccccaaggccgcggccccgacgctgggcccgggagcggtccccgcgcacagcgcccggacgcgtaggtcccgaagtaggcccgcgctttgcttcgtaactggggatctctgaggacatcttagttctgaccttgtggaggccgcgtctctgctgcgtgttcgcgggccagtcgggccactttgtagaaatcatagccctctaaatcaagggacgaacgctgctggctggagtttgctggacactttcattccacctcctaacaaagagaattcctattccttgaggtcccttggggcagcagttaaagactacacgatccaggagcacctaggacctggggccaccttcctgcccgctttattggatggagcactgcctccccagtttctgggacaccttggggtgtggccttggtgagtgaaacttggggtgctgcctgctgggaaggaaatccggaaacgcagagaggactctctggtggtgacccaggccttgtcagatctgagattcttggaatctcagattgtgggggtgtggatggtgaatgaatttgggtatgcccccctttaccccagaactgaagaggaagcaaactacttgccacacttgaggctgcatgactattcagagaagggaggagccacttctgaattcagagtaggactgcatcaccaggcaaatacctgttctgagccagaaagactctggcttctgaggagatcctgagagtctgagtagtgccaggaagcagcctcagaatttgggggcccattacacaccccagccatgttcctgcgacggcttggtggctggctacctcgcccttggggccgccggaaaccaatgaggcctgacccgccttacccagaacccagacgggtggacagctcctcggagaattcaggaagtgactgggatagtgccccagaaaccatggaagatgtggggcatcccaagactaaggactcgggggcattgagggtttctggggctgcttccgaaccaagcaaggaggagccccaagttgagcagctagggagcaaaagaatggattccctcaagtgggaccagcctatctctagcactcaagagtctgggagactggaggctggaggggccagtcccaaactcagatgggatcatgtggattcaggtggcaccaggagaccaggggtgtcccctgaagggggactgagcgtccctgggccaggagccccattggagaaacctggtaggcgtgagaagctgttgggctggctgcggggggaaccaggagctccctcccggtacttggggggcccagaagagtgtctgcagatctccaccaacctgaccctgcatcttctggagctgctggcctctgccctgctggccctgtgctcacgaccactgcgggcagccttggacacactgggcctgcgtggaccgctgggcctctggctacatggcctactgtccttcctggctgccctgcatgggctccatgctgttctgagcctacttactgcccaccctttgcacttcgcctgcctctttggtctcctgcaggccttggtgctggctgtcagcctccgggagcccaatggggatgaggcggccactgactgggagagtgaggggttggagagggaaggtgaggagcagaggggagacccgggaaaggggctgtgaccgtggggtgggggcaaagggtgaagagagtgtgggctttaggagaaaagtgtgaggcatgacccaaattgtaagcatagggacctcagggatggggaagaaacccgagtacgagggtgcagggccccccttcatacacaggagagaacagaactatttagggtgtttgtgtttatggacagtgagggcactgctcttggattcaccagctgttatttttgcttttacttttctcccaccttcagttttttttttttttccacctccactttttaaaagcaaaaaaaaaaaaaagtatgatggtggtgaataaagaccaaagggtcctctctacctttgaaaactctcctggggtggaggagaccagggcaggatagacagacctctgcagtaagagagtggttgggaaacccagggtgttccttggatctcaggatctgagccatcgagggaagagtggggctgctaggcaagtggattagggggtctggatagggccccacaggtgacagggagcctgcagggcggatctggtgatcatgggagccagagggagtggggacagtgcaggcagtattggcaggagggccagtgcagaagggctggtagctcaggcagtgtgggggaagcactgaagcctgtagtccccacttgggggctaggggtttgctcactcagcaataaataactgtgtcacatcaaatcctaaatataccactacaaagtgagagttactgccactctgttcttactgacaccgtccagctgggagtttaggtggtagaggatccagggggaatgttgaaatgggaggagtgggaatgacgtctggagacaaaccccagaatgagatgaggattgaaaaattatctttattatcttgagtgggagctggagctggaagtctccagcttctccctccaacaactcagctcccattgtacccatctggggacttagatgaagttacaggtcagttattggacagctcacaggcctctgtgatggggggagggaaaaagaaggacagaagggaagtccagggagaaaagcaaagttgatagtaatggggtgggggagaacgtgttctttcattccctgtgtcaaaggggagtctctaaggctcttttccctccacgtatgaccctctgccccctttatccagtgcaaactcagaaacctctcttttgagtagcccagaacccatcctgcctccctcaggtgacatcacagctcttagccacatccctctggtgacatcacacgagcctctttcaccctgtaacaccagaagacttggtgagtcctaatcctgttttatgagattttaaccccttaccttgattcctaggagtcaataagaaggctttggagtccaggcaggaagtcagggacttgaattcctccacacacttttcgggaggatgtggtgagcgatctggaagggcaaggtggggtcaggccagtcaaaacccctggaagcacctagctcttcctgggagggtgtcataggacccagagtgaggagttctcctgccctcccttgtttccctccaacccttcctgccttgtatccctactcactgtagaggagaaagcgctggtaaccctggcctgtctcattcagcatgattccacctgggcatgagctggaaaagagctcagtcttcatgtcagggcggcctgtcaaggcaggtgggagaagtatgagaacagagatgcagaaccaaactcaagggagggtgagggctgggaagaaccaaccttcagttctgagatctgtgctcccttcagtcaggtggtagatccatttccggggcacacagagcccatctttcctgcagaggtggtggtggcaaggaggaaagaatgagcatcaccccaaccatagtgtcccagcttcttttttttttttttgagacagagtctcactctgttgcccaggctggagtgcagtggcgccatctcggctcactgcaagctctgcctcccgggttcacgccattctcctgcctcaacctcgtgagtagctgggactacaggtgcccaccaccatgcccagctagttttttatatttttagtagagacggggtttcactgtgttagccaggatggtctcgatctcctgacctcgtgatctgtccgcctcagcctcccaaagtgctgggattacaggcgtgagccaccacgtctggcctgtcccggcttctatttactccattgtatttgttattgaagcccagctctccttgggtttcaagctaccaagcattggttaggcacatctttctccagagggcaattaatacagccactgaattccgtgggccaagcatagtagatataccagctaagaggccagctcttggtgggtggattctcacactttgggcagagactgaacccagtgatgcttctgcctccttaccactcacatgcggatggtagcacgaaggtggagctgcatcggggcagagccagcagccatattgaagacaatgttgtccacagggtcaaaagttgccaactcctccttggtgggagctgcccctgcgataaagtaccactggcccaagtggacctctgggaactggagagacaatgaagggagcaaaagagggtgggttccagcacaggatgggttcaacctcttcatcagtcaaaacagcaagatttaggggtagaggtgttggctgccttcctctttccaactggggattggatccatgacaaagagtcattaaatgacttttcctctttgcccctccccagtcaacctgggtaaccaccccaccccccaattctgccatgcctctgcattgatggccacagtactgatatttttcttcttgctttcattatcacaacactcacacccccttcctctcttcctttcccaagatggtctccagtcatcctaggccatccacccaagtccctcagagcctccaccataggcttcccccaatctcagtccatacctccttcccatccacgcccagagttgtcagttgactgtgctcagggcactggtagatggagttaaggataataccatagaagtagagcagagctgcccaaatttggtggaacatcttcaggcaggagggagctggtgctctgtgtgccttaactgctctctcccctactggctgctcagtccactctgctttcagctcccttgcgttcgacccttgaccctttcacctgctaatgagtaacttcaaccttgttttccaacccaaacctggattacttagtgtttgggacttcctccccctcttccggatgcaaccactccatagtacaccctggcatgtccagggtttctcaggagttatgaggagagctgagctgtccagggagaagcctgtggtctttgaacctgtatctgagctggttatttgttgcactgtgcagcactgaagggaagtagcttgactgggcctctcattcattcacttagcaaactgttttgaatcccaagtcccagttgtttcccaagaactagctaatccccggggacataaaaaaacgaataagacatagcccctgatcttgaagaagtcgttagagggaaaactagctgtgtagacaaaccattgcaatacaacttggtaaatgctttagaacaggtatgatgcaggtgctggggcacggtggattgctctctttagtttacaattagaaaaatatgtataccctggcagtgttcactgacacattcactcaacatttattactacaaagaggctatgtaatctggctgttagagaggatagatgttggtgtcaggcagaatgtgtccaaaccctaactacaggcagggcaggtagctcatgcctgtaatctcagcactttgagaggccaaggtgggcggatggcttgagcccaggagttcaaaaccagcctgggctacatggcaaaactctgtctctacaaaaaatacaaaaattagccgatgtggtggcacacgcctgtagtcccagctactagggaggctgaggagggaggattgcttgagcctgggatgtcgaggctgcaatgagccctgattgtgccactgcactccagcttgggcgacagagactctgtctccaaacaaacaaaacaccaccaacccctaactgctatgtctgttttttcatctgtaaaattggcaaatcatcaatcttataggattaaatgaaataatgcacataaagcccttagcaaagacttgcacatggtaagtccaaagtatatatttgctataattaatagtaatgtttgcaaagcacttagtttctggtgggtaataagttctcaaataataggcagtaagaattgccaaataggttgtccttggatagcaccaagtgactggagcagttaatgctgtgagagatggatcttcctcgatagattatttatttacttatttatttttaagacagggtctcactctgtcgcccaggcatgactttgacttccccggctcagatgattcccgagtaggaggtataggtgcacgccatcacgcctagctaattttttgtagacacggagtttcaccatgttgccccaggctggtattaaactcctgagctcaagcagtcggcccaccttagcctcctaaagtgttgggattacaggcatgagccaccacacctagcttgataaatttatatcccatggactgccacaaaaaatttgccgagggctgaggcttgcgatttagttaaaaaacaaacaaaatttgggtgaccagtatattagagtttattaatactgttctattttggtgtaatgtttgaatttttttttttttttttttgagatgggagtctcgttctgttgcccaagctggagtgcagtggcgcgatcttggctcactgcaatctccacctcccgggttcaaagcaattctctgcctcagcctcccaagtagctgggattacaggcgcccgccaccacgccaggctaatttttgtatttttagtagagatggggtttcaccattttggccaggctggtcttgaactcctgacctcgtgatccacccgcctcatcctcccaagtgtgagtcactgcgcccggccgaaaatttttgtaataaaaagctaaaatgtggttaggcacagtagctcacacctataatcccagcactttgggaggccaagtctgcaagaccaggctgggcaacatagcaagaccccatctctataaaaataaaattagccaggtgtggtggtgtgcatctgtggtccctactagggaggctgaggtgggaagatcggttgggctcgggaggcagaggctacagtgagttgtgattgcgccactgcactccagcctgggcgacaaagcgagaccctctctcaaaaaaataagctaaaatgttaacagctttttattggggcagtaaagtacaagtgctcgatctggagtcctgtaggcctggatttgtcaattctgacacttatgttcgtctaagtgtactcacttaaaaaatgttaaaagctcgttaaaaggctttttaaaataatacacaaaacccgtagtatatgggctggcacaagtgctcattaaacagctgcttattagaactcttaactaaaatataaccaggacctgggtataaactacgaatcccagaaaggttggacaccccaacagcgatgtgtctttctggaggactcgcagtttcgcggggccgaggcccttggcccagggcaggttaagagaagagggcacggagaggcggtaatgcctccacccccggccttcggaagcacgctggccggcctttaaattccccacggtcagggtcttgtctttctgtccactcggactccatttgctcccaattctcaaactcggaagcgcctcttttcttgacaagtcgtgcaacttagtagcacgtttacttttcctaaaacgtgtcatgtccccttggccacacaccgacgaatgtgacgcccacagcccttaaaacgcccacccggcagaaccgaaatctagcccaaccaagcaaccgagaacaaaattgaccagtgccgcccccaaacgcctactgaaagagtaacttccggaggcacagaagaaagggcgcagcgagggcaatagggtggagaagagttttagctggctaggacagtgccgcctgaaattatcagcctgccaagatttaaacatagatgaatgtggcataatcccccatctccaaagtccaaggtccatacgaccgtccatagcccctctcgaggcagtggtagagtcccagctggtgactgtttttcaggcatttacggtagccacctcaatcttctagcgctcaagcgcgcgcacagacgtgaacgccgccagaggggggagggggtggggcgatgcttaagtgtccacgcatccgtagtgcgacgcacgcaggcgtagtacggtcccccgggcgacagcggtggcggctcctcggggtgctcggctccctcccacctaggccggccccggcccgactcgccctcagaaactcactgtttggggctgcggactttctcgtcgtgccccacaaaagtaaagcttggggacctggggggagccggaagtatcgcttcgagatccccaaatactatcggggaaacggaagtggccgtcggtggcaggtttgggggagaccggaagtgacggtccgtggggaagtcgggggcggagccgcggggtggtgggtgtgtgtgtgtgtgtgtgtgtgtgtgtgtgtgtgtgtgtttggctgtgggttagttgtgccgttctgctggaacaccgtgggaaggcagtagacgcgggcagtcagctagcaggtctgtcgccccgtgagtgccgtttcgggtctatagtgagttaggagggttcgatgggcgtggcgcgcgtgcgcgaaaccactttctccgcagagtgtggggcgaccaccgctttcgcgttgtcccaggattttccgacctctggggcgcttgtcctgccgtgaccggtgatgacactagtctctggtctcgtgcttccttcctaatctgactggctccctgcttattgtgattggcgtcgtggagcccctcccacctctcgtcctccagctccctaagccgtcgatctcctgccctttgtgtttctctccctgtgccccggaatcagaagggggatggggacaggtgtgaatgtgtgtgtgtgcaggagaaactttttaggtattggggcagggattaatgctagggagtctttcgggtacactctggtctgggcaacagcgggccttccttccttcgttcttctttagagacctgtcggccatggagcctaatgatagtaccagtaccgctgtggaggagcctgacagcttggaggtgttggtgaagaccttggactctcaaactcgtacctttattgtgggggcccaggtgagacacctcactagttctggaagacacctttagcttttcctcgtttaggccccttagcctgagagatgagcttgattttctggtcaccagattttctttttttttcttttttttgagatggagtcacgccctgtcttccaggctggagtgcagtggcgcgatctcgactcactgaaacttccacctcttgggttcaagcgattttcctatctcagcctcctgagtagctgggattataggcgtgtgccactatacccagctgatttttgtatttttagtagagacggggtttcaccatgttggtcaggctggtctcgaactccttacctcaggtgatgtgccctcctcggcctcccaaagtgctggtattacaggcatgagccaccgcacctggcctcagattttatttttattgatccctttgttcgtattccagtagaacgttttctgatgttttgtgagtgaggctgattttgttctgtcctccacatggatagaacttaatgcagagggaaatacagaggaaggaagaatctgtgtgtcatcatcatgggtggaccccaacccaaagggacaggcatggctctggcctttgggaagggaaacagcacaggaaccctaagcaagtgtgtcttactgatagacattggtcaggtctatgctgtgttcttaaagggtagaaatcagaacccataatggagataggtccttgatagactgttgagtgaaattactaatttttatggcatagcttgagtctcttgagcttaaagccttggacatagctatctgtgtctttactcctgtaatacttggagacaaattgcatgtggggtggtccatggttttctaaaatgtgatattacctggatataagaaagccatatatagacttgtgattagatgtatataaatactctggtacttcccaagagtcagtttgtagttaggaaaaatatttctctttttgcttttttttttttttttgagatggagttttgctcttgttgcccaggatggagggctggggcgcaatctcagctcactgcaacctctgcctcctgggttcaagcaattttcctgcctcagcctcctgagtatctgggattacagacgacgcctactaccacgcccggctaatttttgtatttttagtagagacagggttttaccgtgttggccaggctggtcttgaactcctgacctcaggtgatccacctgcctcggcctcccaaagtgctgggattacaggtgtgagccactgtgctgggaccttttttgctttcttatcttcttagtctttcttcattaacctgataccagaccccatcttctttgccattttttaatcttggaaatcacaggagagtctggtaaataaactggtatcatcttgtgtttggaaaggggtcactgatgtctctagacacatactcccttggatgccagacagataatataatgtccatgtgttttttttttgtttttcatccgtgttatttttcctggatctataacctgagcttcattaagtttatttatttaattttttgagatggagtccctctctgtcacccaggctagagtgtagtgatgcgatctcggctcactgcaacctccgcctcccgaattcaagtgattctcttgcttcagcctccctagtagctgggattacaggcgaccaccatgcctggcttatttttttgtatttttggtaaaaaaggggttttaccatgttggccaggctggtctcgaactcctgacctaatgtgatctgcctgccttggcctcccaaagtgctgggattacaggtgtgagccaccgcgccaagccaaatttattgtctgtattttgacagctgttactttagtttaagggtttgcacagtaatgatctcacggtcaagacaaacgggtagtgattctgtggtggtttttacccctcacctccacaactcggttgtctgtctttgttcttcctctttcctccattctttccattcctgtgcatgcctcttcttttcagatgaatgtaaaagagtttaaggagcacattgctgcctctgtcagcatcccatctgaaaaacaacggctcatttaccagggacgagttctgcaagatgataagaagcttcaggaatacagtaagggggctggggaggcagttcagaggttggggctactgtctggagggatgaactgaggccatgggtttacctgttcatactatgttttggtgtgtgtctatttttctgcagatgttgggggaaaggttatccacctggtggaacgggctcctcctcagactcacctcccttctggggcatcttctgggacggggtctgcctcagccactcatggtgggggatccccccctggtactcgggggcctggggcctctgttcatgaccggaatgccaacagctatgtcatggttggaaccttcaatcttcctgtaagcttatgttccacaggggagggcttttgtgggtagctttggttgtggtagcaccagggaattaataagatagatgcttccatctttagattgggttcagggggccctgtggtgtgctattggtctcagtctttaaggagaaaaggaggtagggctccagggaatgaattggaggtgtggaggccttagtgttggcttctcccagaacaacttcccttaccctttccccagagtgacggctctgctgtggatgttcacatcaacatggaacaggccccgattcaggtattgaggggcctccgagggtcagggaaggggatctgggagaaggaggctgggaggtggggtggacctggctgagagatggctgggacctgatttagtaggtggtagaactcatggcttcatctgtaacctaccctgataaaccttctctcattgtagagtgagccccgggtacggctggtgatggctcagcacatgatcagggatatacagaccttactatcccggatggaggtaagtgggcaaggctggctagggtctctctccaccctccctctcccttttctctcagcctgggagttagggcttcactggccacatccacagggtttggccttcataatctagtcttctctgcagtattcattcttttgggcagaaaaagtatctttgtgaggctctctcatttctgccaatcctcttggtgcctggtatctggggagtttgtttcagacttagtctcatggcatctcttttcaattaaaggattctactctcttaacttgtggaggctgggaaaccaacttgtggaggaaaggaaaccacaatctctactctttgttagaaatttatttacaaatattacagatgctgtggccgggtgtggtggctcctgcctgtaatcccagcactttgggtcgccatggcagggggataacgtgtggtcaggagttccaatccagcctggccaacatggtgaaaccctgtctctactacaagtacaaaaattagttgggtgtggtggcacgcgcctgtaggcctggctacttagaaggctgaggcaagagaatttcttgaacctgggaggcggaggttacagtgagctgagatcatgccactgcactccagcctgggcaacagagcgagactctgtctcaaaaaaaaaaaaaaaaattacagatgcttattatgcatctaatttgtgtcagtcttatgctagttgctagcgagtcggagataaaattgcagagccatgccttcagggagtctagttaggatactttctctgttcagtctcctgtagagtaatcctctgcagcagtcttaccctgcctttggtatcctgactctcccctaccttcagtgtcgaggagggccccaaccgcagcacagtcagccgcccccgcagccaccggctgtgaccccggagccagtagccttgagctctcaaacatcagaaccagttgaaagtgaagcacctccccgggagcccatggaggcagaagaagtggaggagcgtgccccagcccagaacccggagctcactcctggcccagccccagcgggcccaacacctgccccggaaacaaatgcacccaagtgagagatggagggaatctttagtgggtggggaatcctaagtgaagtatggggagaaggaaatgaaccatggcaagggagggaaaggattacttggaggtcttagttgaagggttagcattgaggggcgaggaggggctctctcggtataggtaaatgacgctaggacaggcagctgagaagaactgctgctctccctacggcaaggaaatccaaatggtatctcctgagcctgatcggaattctcctctgagttcacgaaggcctgctctctttcttagaattagtctttcaccattgtaggtgcaggattgtggtggggagggtgggagcagttcattttcttctccctatcctctcatgggtgggagtaaagaatagaagctttggctgggtgcagtggctcatgcctgtaatctcagcactttgggaggcagaggcgggcagatcacctgaggtcaggagttcgagaccagcctggccaacatggtgaaaccctgtctctactaaaaaatacaggccgggcacagtggctcacgcctgtaatcccagcactttgggaggccgaggcgggtggatcatgaggtcaagagatcgagactatcctggctaacatgatgaaaccccgtctctactaaaaatacaaaaaattagctgggcatggtggcgggcacctgtagtcccagctactcgggaggctgagtcaggagaatggtgtgaacccaggagacggagcttgcagtgagctgaggtcgcaccactgcactccagcctgggtgatagagcgagactctgtctcaaaaaaaaaaaaaaaaaaaaaaaaacaaaaattagccgggtgtggtggcaggcaacttaatcccagctacttgggaggcagaggcaggagaatcgtttgaacctgggaggcggaggttgaagagaatagaagctctgctggtccagagaaggattgggccagggctctgggagaccagggagaaagagggcacatgtggtccctgttgactgtgagggtgggaatctgaggaaggctttggctcattgccccttgggtttgtccacagccatccttcccctgcggagtatgtcgaggtgctccaggagctacagcggctggagagtcgcctccagcccttcttgcagcgctactacgaggttctgggtgctgctgccaccacggactacaataacaatgtgagccctttgatggccctgccctttctcctcagccccagtactcccaaaacagaacaggctgaaatgcagataactctttccctccctggaaaaacattgcaacagggccaggtgcagtggctcacgcctgtaatcccagcactttgggaggccaaggtgggcggatcatctgagattgggagtttgagaccagcctggccaacatggtgcaaccccatctctactgaaaatataaacattagctggatgtagtggtgcacacctgtaatcccagctactcaggaggctgaggcaggagaatcgctagaactcgggaggagggggttgcagtgagccgagattgcactactgcactctagcctgggtgacagagcgagactgtctcaaaaaacaaaacaaaacaaaaaaacacacattgcaacaaaacaatttctctctaaacctgtaagtgattttgtcctcccttacagagaaggtgataatctttgctgtaagcactgtcctcgtatcgtaccccttgtgcccctgaatgaatttagaaaatgtaaagtacaggagatcagtatatgatgacttactgattcatagtagtgttttaataggatgttccttatgtgaataagatataatttatttgcaaagatttggtctacatgtaaacttccaaggatataactgaaagttttggaggacatggtattctcagtaggcattattgcttttattagtgagatggactccagcttgatattttctgcctttttgtgtttggctggttgtgcgcagcacgagggccgggaggaggatcagcggttgatcaacttggtaggggagagcctgcgactgctgggcaacacctttgttgcactgtctgacctgcgctgcaatctggcctgcacgcccccacgacacctgcatgtggtccggcctatgtctcactacaccacccccatggtgctccagcaggcagccattcccatacaggtgggttagggggagtctggcctgagggagagtgaggggtgttgatagagtgacccagggtagctactgggcctgaaggaggttaggaaaggaggagactggaaacatggtgatgaaggctggagatactttagaggtttatcatgaggttttcttggttaggctcttgtatttttctcacatctgcctgtccatctgtctttttcagatcaatgtgggaaccactgtgaccatgacaggaaatgggactcggccccccccaactcccaatgcagaggcacctccccctggtcctgggcaggcctcatccgtggctccgtcttctaccaatgtcgagtcctcagctgagggggctcccccgccaggtccagctcccccgccagccaccagccacccgagggtcatccggatttcccaccagagtgtggaacccgtggtcatgatgcacatgaacattcaaggtgagaatagttgctggcgagaagagcaggatcagcatgatgagggaggttcatgctgaggtgtgagggaacagggtggggaagggagaggcacatgctggtggtggtagcctggggaccagagcagaagcttaagtagacagatgtggggggtgtgggggttggtttgtctttggaggtgtgtttgtgtggtgaagggagtacctctccctgtttagatggagggaaaggcaggctttctgattgggggattatgggcctgaagtatgcctgatctcagaaggatatagttaggccttggccctacctacctcagggccactgtctctgtctccctgcccagattctggcacacagcctggtggtgttccgagtgctcccactggccccctgggaccccctggtcatggccaaaccctgggtaagagtgagggcatcagggcaggctgagctctgggtagagaaagggaagggctgagtgggtgggttgaaggggtccaggttcaaggttacatcagacccgccccccaggctccaccctcatccagctgccctccctgccccctgagttcatgcacgccgtcgcccaccagatcactcatcaggccatggtggcagctgttgcctccgcggccgcaggtaatgacctggaaggggaggcttgggaggtagggcacagtccatggtggcagctggctggcaagggcctggccctcagccctcttcggtctgtctcttctgccacccacaggacagcaggtgccaggcttcccaacagctccaacccgggtggtgattgcccggcccactcctccacaggctcggccttcccatcctggagggcccccagtctctgggacactggtgagcaagggtcggggagttctagtgcgtaacagtctagggagagactcctgtggtggtgcatggaagggcaggtctgaaattctcccttgctctctatccagcagggcgccggtctgggtaccaatgcctcgttggcccagatggtgagcggccttgtggggcagcttcttatgcagccagtccttgtgggtgagttttcattcttccccactcagagtttaaactcctttcctagtctgctcactggcactttccagttctttccatattttcttggttcctgctttcctggaatggggctgctgtagtgtcttgtgtcttcaggtttcagctttttttttttttttttttttttttgagatggagtctcactctgttgctaggctggagtgcagtgtacaatcttggctcactgcaacctctgcctcccgggttcaagtgattctcctgcctcagcctcctgagtagctgggactacaggtgcacgccaccacgcccagctaattttttatgtttttagtagagaagggggtttcaccatgttggccaggatggtctcgaactcttgaccttgtgatccacccaccttggcctcccaaagtgctgggattacaggcttgagccatcgtgcccggccagcttttttcttttttttttaagttacagagtcttgctctgtcacccagactggagtgcaatggtgcaatccagtgagttaaagctcactgtaaccttgaactcctgggctcaaacagttctcccacctcagcctcctgagtagctagcagtactagctcctggctagtaattgtctttttttttttctggtagagatggggtcttgctatgtggcctagactcctgggctcaagcagttctcatgccttggcctcccaaagttgctaggattacagccaagagccaccatgctcagcccagctttctttttttggtttcttacagctcaggggaccccaggtatggctccaccgccagcccctgccactgcttctgccagtgctggcaccaccaacacagctaccacagctggccccgctcctggggggcctgcccagcctccacccacccctcaaccctccatggctgatcttcagttctctcagcttctggggaacctgctagggcctgcagggccaggggctggagggtctggtgtggcttctcccaccatcactgtggcgatgcctggtgtccctgcctttctccaaggcatgactgacttcttgcaggtgagtggctggcttgccattcacctcatcttcctgtcccccggcccagccaggcagtggtaccttcttgccattatataaccactgggtaagagcccctagtgacatgttaggggaaggggccctgggaattcattgactctgaacctttcattttaaagatgaagaaaatgaggtttagaaaaagaaagtatagtaattagtgtcactgctttctgacagcctgttcagaggaagaggtaggtaagttgtgctgcctgactctgttaaatacctaccatacttctgctttaagcagtgaagatcagaatgtaactccccatcttcccagacccgttggtttgtgccctcttgatgccgtattatttccgtgtgtcttcattctcacctcactttctgttctttgttctttctttatttgccaggcaacacagacagcccctccaccacccccacctcctccacccccaccacctgccccagagcagcagaccatgcccccaccaggctccccttctggtggcgcagggagtcctggaggcctgggtcttgagagcctgtcaccggagttttttacctcagtggtgcagggtgtgctcagctccctgctgggctccctgggggctcgggctggcagcagtgaaagtattgctgccttcatacaacgcctcagtggatccagcaacatctttgagcctggagctgatggggcccttggtgagcaaaaaggatgctttggcttgctccaggaaggggcagccagaggaatgtagatggccttggtttaggggtgttgccaaggtgggatgaggttgatgatctggttgtgggtgggcaggccaggtggtaaaggccattgctaacatctgcccttgtcccccaggattctttggggccttgctttctcttctgtgccagaacttctctatggtggacgtagtgatgcttctccatgggcatttccagccactacaacggctccagccccagctgcgatccttcttccaccagcactacctgggtggtcaggagcccacacccagtaacatccgggtaaatgaaggccaggggccccagaactctcctcttttgcacattttattccttatttctgactgcttctctgccaggtaaagctccaattgcccccacacaagccctggacttgttggggtcgaggtggaagtcttgggaggactgaggctttgaactaaacctgttctgtttcctccacagatggcaacccacacattgatcacggggctagaagagtatgtgcgggagagttttgtgagtaacccttctctattcctttcctctcctgggtctggtcaaggcagctgcctcctccactcccagtcttatgattcttgattttgggatctttgtgttatcttgtctctcagtccttggtgcaggttcagccaggtgtggacatcatccggacaaacctggaatttctccaagagcagtttaatagcattgctgcgcatgtgctgcattgcacaggtcaggggctggccaggcgggggcaagtggggcctgttgcatgtgcagggctgccacgtgccagcattccctccttgtattttgcccacagatagtggatttggggcccggttgctggagttgtgtaaccaaggcctgtttgaatgcctggccctaaacctgcactgcttggggggacagcagatggagcttgctgctgttatcaatggccgaattgtaagcaccacctagccccagatccttagccttttgtttcctgaggtttccattctctgcagttttcatttttcttttctaaactgacattctgtaacctggatctaatctatttctaaaggtggttgagggttttgtgttctaaatctgctttctgtccctcagcgtcgtatgtctcgtggggtgaatccctccttggtgagctggctgaccactatgatgggactgaggcttcaggtggtactggagcacatgcctgtaggccctgatgccattctcagatacgttcgcagggttggtgatcccccccaggtaagggacctgttgggcgatggggtcagggtacttgagagaactggagagatctgagaggaagtatggtgttctttaatttcacagccacttcctgaggagccaatggaagttcagggagcagaaagagcttcccctgagcctcaggtactctagagagggggaggttgaggggccagataatgtggagtggagggctgggggagaaaggtttggaggctaaaaattctgaagcctggctcttcccgccatctgacacccagcggg

SEQ ID NO: 499 - DNA, 7376 bp, Homo sapiens
agccgagattgcgccactgcactccagcctgggtgacaagagcaaaactctgtctcaaaaggaaaaaaaaaagaaacctgtaaaatgtaagccatgctgcttcataaaaaatgccattttataggcaaatgtcaaagtggtgcctgagaccactggttctctaagtcttgttctgattcacttgaaggtccctctgaagtgtctgtttctgtccctcccccacctcattctgattcaggagacccatggaaggcctctttcctgtcagggagcctagatcagacccctctccagggacctttccacagaccagggtgcctcttcacccacattccagcaatgcctttttccctggaattccagctggggccgacccctgttctctaggcctccatgtccccactcatactcagtgctgcttgccatctcccattccagacacagacacacgcacacactttaacacacatgcacacacacacagccctcccggggccctgtggctgggtgccaaggatgtgaccagagctgatgcccttctcggctcccccaggaactcaccaaggcccatgagctggaggtgaggctgcacactttcagcatgtttgggatgccccggctgccccctgaggaccggcggcactgggagataggagagggtggcgacagtggcctgaccatcgagaagtcctggagggagctggtgcctgggcacaaggtgagcctgaaactcacaaggtgagtctgtccccacggcgtgaatgcacacacagattctgctctagaggagggaaaggccttgggaagtggggtcatgtggaaaaaacatctggaaacgcgttgatctgggttcagatcccagctctgccacttactagtcagaccttggtcaagacagtaaagttctctgggcctcagttgccacatatgtaaagtggggataataccacctacacatcagagcactggtttgaggattaaaaggtcatggtcatgcacaaagtgcctagaacctatgaagtggatccggtcgcacttaacagctggtacttgccattctaattatcattccccaactgaaccagcattctccccaccccaggagatgagccaggagctctgccaccaacaggaggccctgtgggagctcctgaccaccgagctgatctacgtgagaaagctcaagatcatgactgatgtgagcccccctcagccccagccccggccccatcttccctgcatgagcccccatcctcccagactggaaggcaggtcactgggggagggaggggcaggatttcaggccagtctgggatgcagggagataggtcagcagtactgaagttggtggggggtgggaggtgacgacactgaagggctgcgctgggtcctgagaccctcgtctccctccctgcagctgctagccgccggcctgctgaacctgcagcgagtgggactgctgatggaagtgagtgggtgctcaggaggggaccctggcacagcccgacctctgagcctggggatgagggtgggccctccagccatccctgtctgaattcccactgccccgttttttgggatgccttgccctccctacttccctgttactggggactccaagcaggccacaggccccccatttctcagactgacatccttgagatcttccaggcccagtgcccagttcatccttcttcacccccgcccctgctgtccaagcttaaggtcctcacctttcctcagccagtgccacccctggggaccttccaaaagtgtgctgctcagctctgctccctcctccaggtgtcagctgagaccctgtttggaaatgtccccagcctgattcgaacccaccggagcttttgggatgaggtgctggggcccaccctggaggagactcgggcctcgggccagcctctggaccccattggtctgcaaagtggcttcctgacggtgaggcctgtgaagggctgtgtctggatggggcaggactcggagccctcgggggtcctgtgtgtagggcatgcccacagtatgcaaatctctgtgatttgaggggccgcaggacacagcccctacccctaatatcacctcacctcctcccttcatgccacaagtctgacctctgtgccacaggctccttgttcttctggaggcctttatgaaatgaaaatgcagctgtctcagagaagggtcacaccttggctcccatcaactacaaaagctgggtgcagcaaatgaggcctaagtgaggggacccttaggaggacctgggtgggtgtaaaaggccacaggaggcacccggggcacggagaagagtgacaagagaaagcaagagggcctaggatccgactttcttctacaatgttacctagccaggaaaatgtgggccctgcaggaaaaagttgcagtggggtagagaggtaggcgtactgcccctgggagccttaggtaccccctccataggagcaaggcttctgagccaactcttaggtcgccaccccacccccagggtgaaatgggatctgcaatgtcctgacaacggtccagctgaattatcgatggtgggagagtaagtccagagcagcaggccccagtagcactgtggatagagggagctcagagagctctgggtcagtgtcgggacctcaggctccttcgtggaatccagagaaaggggcgtagcctcgagagcattcctgggaggatcctgggagggagggactgtcaggagctgggctaagggcccctgcgaggctctcttcacctgctcctgggtcctgcagctagagcctgtattcatggccttctccccatgcctgctccccacctcccgtatctgtctctccagtttggccagcggttccacccctatgtccagtactgcctccgagtgaagcagaccatggcttacgcccgagaacagcaagaaactaaccctctcttccatgccttcgtgcaggtgggagaaggggtgctggggagggggacgggtgcatcttagccggccggtctccagctgagcctgaggctgagttcaccactaggcagggcaggagggagcaaaccctgagccccacccaccttccctgcagtggtgtgagaagcacaagcgctctgggaggcagatgctctgtgacttgcttatcaagccccaccagcgcatcaccaagtacccactgctgctccatgctgtgctcaagaggagccccgaggcacgagcccaagaggccctgaatgccatggtaggtgccccagtggggctgggactctggtgaatcggggactgggaggggggtctctttcttagtgtgtctgtgacagtgtggcgctgtgctgtggctggcattggttgggaggggacggctgagccgtccctcctcccacacccccaaccccacctagattgaagccgtggagtcattcctgcgacacatcaatgggcaggtccgccagggcgaagagcaagagagcttggcggctgcagcacaacgcatcgggccctacgaggtgctggagccacccagtgatgaggtggagaaggtgagagggcaaagggaagggacccaggaaaagcaaggtcccagggatactggtgaaggggagggctgcaaggccagaacaccccgtacttgggtgctacaagggtgtccatcattcctacctggtggtgacagtccaaggggtacaggtcagaagagcaaaaaggaggccctgggaggctttctctagcccatgggggaaggatacaaacagaaaggtgttggtggcagaaccaggagccgcccttggccaggaagtccaggcagactgccgagcgccctgacccctcccctctgtgtccctcagaacctgcgcccattctccaccctggacctgacgtcccccatgctgggggttgcatctgagcacaccagacagctgctgctggaggggcctgtgcgagtgaaggagggacgagaagggaaggtgagggtgctgcggacagagtggaggggatggggcacggtgggagaaggtaagaggcagaaacgccggaagtgggagaagaggggtttggggaagaggatgtggttctggctaagccccagtcatttgtgtgaccctgagccagccactttgcctgcctgtaaagtgagagatgtgaccaaagcgacgcccctggccactcccgcatttgggctctgcgtgtgtccctgtgtgcctgcgcaccatgcctgagcctcctcccggaccagccctgcccctggctccagctgaccctgtctctttcccctacgcccccacccccagctggacgtgtacctgttcctcttctctgatgtgctccttgtgaccaagccccagcgcaaggcggacaaagccaaggtcatccgaccccctctcatgctggagaagctcgtgtgccaacccctgcgagaccccagtacgtccttccttcagggagtcttttcttctccctcttctcagcgaggggaaggaggagctgggacggagatcaaataaaggctggcctcttgaaggttgtctcctccatccagacagcttcctgctgatccacctcactgaattccagtgtgtctccagcgccctccttgtgcactgtcccagtcctacagaccgtgcccagtggctggagaagacccagcaggcccaggtatgggaaagccagcaacggggaggcatgggcaggggtccccggagctcagaaatgggagcacagtggtggatcacacctgtaatctcagcactttgggaggctgaggcaggtggatcacctgaggtcaggagtttgagaccagcctggccaacatggtgaaaccccgtctctactaaaaatacaaaaattagccgggcgtggtggtgtgtgcctgtagtccccattacttgggaggctgaggcaggagaatcacttgagcccgggaagtggaggttgcagtgacctgagatcgtgccactgcactctagcctgggtgacagagtgagaccctgaagaagaaggaaaaaaaaaagaatgtaggaaggaaggaaggaacgaatgaacatgggagcgcagaggggaggaggagagaggctggggtggattcagtttcagactggacaatctgatgtgccccagagagggaggcagagcctccaccatccatcagaagacagaaaaagcctttggccagctactgtgccagccactgggagagcccaagatacagcatcccctgaaggtttgtacagcctgaaatgattaacttctagaagtcatcttccattcgcagacatttacagggcacttgctgagtacggcaggcactagagctaggtgctagggaatcagaaaagagtaaaccaccattcctgccctcaaggcctaggtgctgcagcctggttgagtaattagtatacaaacaatagagagaagttatgtagaatgaagctgggacagagaagggagcaaggcattgtctgctgggtctgtttggaagggacacagaggagctgatgtctgagcaccatttgggaggatacctaggagtatgtcagggagtcagggtggaagggaagggcattccacatggaggagcagaacgtgcaaaggcgggaactgtgaaacagttgtgtgtgttgagagaactgcccccattggtattgctacagtatcaagtacaagagtagacgcagcagggagaggctagggggtaggtgccaccaggtcatgcccatctctgcatgtcatgataaagcatcctatagatgagctttgtcctttggatgacagagggccagtgaaggagtcgggcaggggagtgatgtgagcagataaaaagcaggaggagttcaaaagaagagagatgcaaatggagctgtattaggtcccacaaacttggtggcctaaaatgcatcagaagcttactctctcacagttctggaggccagaagtttcaaatcaaggtgttggcagagctgagtttcctctggaggctctagaggagaatccatccttgcctcttccagctcctggttgccccaggcgttccgtggcttgtggtaacaaaattccaaactctttctctgtcttcccatggccttcctctctgtatgtctctgtgtccaaatttccccctcctttctcttacaaagatgtgagtattagatttcgagcccaccctaaatccagggagaactcatcttgagctcttaggatctctgcaaatctgcgaagactctttttcgaaatcaggtcacattcacaggttccagagggtaggacttagatatatctatcttttgggggggccactattcaacccaccacaggaacggaatggccaaagagaagtgaagatttgagttagacttttaaggataggaagaccatgagcagcagaatcagaggaccagctgggctggatatatttctggaatgacggccatatctgcctaagtatggagcacagtgtttgtgtgagtgcgtggtaagaggccagattctgcagaatctcagagctgcagaaccctgtggcctggatgcgcttgagttaaatagggtcaacaagagacagccaccgtgaattctttttttttttcttttgagacagagtcttactccatcacccaggctagagtgcagtggcatgatcacagctcactgccgcctcaacttcctgggctcaagtgagtctcccagcttagcctcccaagtagctgggactgcaggtgtgtaccaccacacctggctaattttttgcatctttttgtggagacagggtctttccatgttgtccaggctggtcttgaactcctgagcttaagcaatctgcatatctcggcctcccaaagtgctgagattacaggcgtgagccaccgtgcatagccctgccatgaattcttgagcaagggtgaaatcagtgtgtttcctcttgaattaggttttcaggaaatcaggtagcagtgtgctgggtgggctggaggagggagaaattggtgacaggaggtttattgtactagtttgggtgtgaaacatggaaggtttagtgccacagccttagggagacattgcaaaaagggacaaaaaacaaaggagaagaaaggacctaaagaagagggaagaggccgggcgcggtggctcacgcctgtaatcccagcactttgggaggccgaggcgggccgatcacgaggtcaggagattgagaccacggtgaaaccccatctctactaaaaaagacaaaaaattagccgggcgcggtggcgggcacctgtagtcccagctactcgggaggctgaggcaggagaatggcgtgaacccgggaggcggagcttgcagtgagccgagatcgcgccactgcactccagcctgggcgacagagcgagactctgtctta

SEQ ID NO: 500 - DNA, 14938 bp, Homo sapiens
gttctatccttcattattgcttctttgcagttatttctcgttcttcctcatgataggccatgttattcgaagactgcttctccttttactagcctccttgatggctgtattttttcattgctttcatccctttgtccttttcctgtggattctatgagagcaattcgaatttgctctactgactggaatgtgtttctagggcttcagttctttcctttatggccactgtggagcgctgggctctgctgttgcaggtgggcacctttgaagcttttcctcctgtctggggtgcttttcacttgggcttgtgcctcagcctctgcattatctgagctcctctaataatcttatatccccattgctcactgagaatttgaaatatggatctttaaattcttttttatttcttcctaaaaatatttttttcaaacactgtattttcaactatagtcagtgtattcggttcagaagatgttcattggttccattggtccgtgctccataaaaaccttgttacagagacacacagcacactttcaccctcttgccaccctgggtcccctggctgaacaccccttgaagagctaaagctggaaggcacagtgggttcacccccagtcccgatgtcagtgctttggagacaggcactcattgggtgtggttggctgggctgaggaaggcaggttctctgacccacttagggtcaatgtatgcccttgtgaatacaggaaggggcttattttgttccaccaaataggctacacggaagaaaaagccatgccagtcctccctccgcccggccagcagcattgtaccttcggggaccacatggttcaggactcagtgggacatgtcctcccccttacctccccaacattgcaaaccagcagggaggaggagaggcaaggcccaggctcaggacagatgagcagcagtccctgccccaggggagggtaaggtgctctcagggctctgccaggttcagtgatggccactgggccaccaggccccttctcacctacatgcctctggccaactgagccactaacaatgaaaatgtcctcaaatgtgcccgagagtgtctcattatttttgaagataatggaaatccctcccaaggctaacaattgttgacactgttcctgtgcagtttttgtgttgctttttggctgttttctgtactttgatgtgtattttaagaacaagttggaagagagattactcagggctacaatagcctcaggtcaccgctagtgtccttctccttgaatccccataacatggagcccagaagctggcactaacagattctcagtaagaatagacaaatgagtcgtgagttttggctgagatatttgggactggaaactgatctagacccaggctgggatggatctagggcagggattgggctgtaacaggtcacagggagtgggggacgtcagaagcctctgaaggcacagacaccacctgaaccgaggcaagaggcaagtcccgcgtgcaaaccaggctgcccaggaagtacagggctggacggcaggacctcagttgtccggagcaggagccccacccctgtggagctgatgcgagccaccacgcatcagggggttcagggatagtgcaggtaaaggtggagctgagtgtctccagctgctgcctgggcctcggggcacaggagagacccagacgctgtggccacgcctccagggcccctgggcaacatctccacctgtgaacctccagccttcgcatgctgtccttggcctgcagggatcccagacccccactgacaacaagccttgcttctgcgaggcctgttgctgccacggctggtcctagttctaggcatgagattttgccctaaacacctttctcttccacctctggacactcacagtgggatgggggaactggaggacctccctgcgcccggtgtcttcataaagcagagcttcttgggcccaggcccctcggtcagccgcccccagccgcgcctgctgagcgagcaccagcaccaggagtccgggcgtgcgtgggagtcgccgtgaccaggcgagccagcatggccaaggaccctaccgtcctcctattgcagagcgtagtgacgcgaggccagagctgggctagaataagtgcccgggtcattaggggaaacaaggaaggaaagaggaggaagggcgagaaggcgagcccacccagctcagaagcgcctaccggcaagcccacgccagcctcctggcctcgcgctgcccaccaccctccttcttccctagaaagtgagtccttgacagaaaaaactgccaccgttctatgcctggaaggcgctagcaaatatgccacgggccgcaggcagccagctctcaggatcctggccttgggccacgcccggtgcgactgtcaccttgtccatcagagctggggtctctcaaaactgcctgcctgcgtcctgccacagtcagggccgagggtgtccgcatgggcttccaggaaagaattctctcctggggaatttcccactgtagctagttgttctccagcacattacacaggcattaaagggaggttaaatagccggtctaccgcagcagagaccctgggagttctgaaagccgccggctccatgccccgcctctgtacaggggaggctgaagcctctgcggaaggcggggatatgggcaggtggcagcgccggtggcagcgtgggggggcagctcggggaatgcacctgtacccagccacctgtgtagtgcctcctgcccctctgaactgcccccgcgggctggccacaggcgtctccatgagttcaacactaacaccgcctgccatgcaccctgttgaagaagccccagacagagggcaccggtagggacagaaagaaaacacctcttatcttgcttttgtaaaacgtgggccaggcacggtggctcacgcctgtaatcccagcactttgggaggccgaggcaggtggattacctgaggtcaggagttcaagaccagcctgcccaacatggtgaaaccctgtctccactaaaaaatacaaaaatttgccaggcacggtggcgcatacctgtaatcccagctacttgggagaggcaggagaatcgcttgaaccctggaagcggagattacagtgagctgagatcgtgccactgcactccagcctgggcgacagagtgagagtccatctcgaaaaaaacaaaaaattgtggaactgtcgcacctatcaaaacaatttttgttgtggagtttattgggggggggggggtgggggatgggggagaagcaagaattataaatagaatacagaaaaaaatgtttattagtagagacaaaaagcattagataatgtccctcatgttaacatctctaacaatatttaagttaacgttaggtgagtggccaagatgagcatacgctggggcgtaatcccaggaatgcaggctgggatggatctagggcaggggttgggctgtaacaggtcacaaaggaggaggggttgtcaaaagcctttgaaggcacagacaccacctgaaccgatgcaagaggcaagtccagcatgcaaaccaggctgcccaggaagaacaagggctggacggcagggcctcagctgtggagggcaggcgccccactcctgtggagctgatgcggagccactgcgcatcaaggggttcagggatagtgcaggtaaaggtggagctgagtgtgggggtgtgtgctcccaagccctgccctccttgctgccttccagcctctgtacccccaaggtactctataccatggttctttctctattccactaacacaaaggtcagcctgcatccctgcctgctccaggtattttaatgacaacctccaaatattggcttcttctcctccggcccccctgcatctggtcctgcccattttcccctcctctcctatgggccccttcagtcccagcccctggccgggacccactggggcacacattctgccctgtgcttctgttcaccaccgtgggctgcccttctctttccatgggcttctgtcaaaatcccacccagccttcaagggctgcttcagttctgtcatctccagggagcctgagtctcagccaggactgtcctccaaagctccacactccccctcgtaggtattcacacactcaccgagcctccctttgagacccgagccccttgggggtagtgggggtctcctcctctctgtgcccctcagcgcctcacacccttcccaacactaggacattcagtagtttggaggacgactgaaagtgcgggtgatatgtggctctgcgactgtgtggtttgccccccactaatttgtcacagttcaaggaacatgcctgagcgttttcatgataatgagagaaaagacatgaaggaggagaatggaaatagaggctttggagaagttaagagtattgaagttgtactcactgtggctccccggagtcctggaaatcttgaggggacagtttagtggaagacttgatgatgagctccttctcctaagagtagcacagtggaccaaaatcttgtgaagcaaacccctcccacgtggctgtgagctttatagatgtagttaggcagaacaatgtgttactcaaaattcctctctacttattcagagacaacttgttctgaggcccatgaagggtaaaacttgagtgtcttgggggctctgagggagggaggaacgttcctgccgggacacaaaggtggctgagctgagctgggtgtaaggagaaggggcaggagagagggggcaggcatcccaccctccatagaaggacacagaactgcaggggcctgctgtatgtagacttcaggaaactagtgttgagggggcttcagcaggcagagatgcagacagcagcagggactcaccgacctggtaggggcctcatcgcagccaaaagagctcaggtttgggcaaattacatcaatgttctccattggtagtgagagtctctgctttcattcatgtacacacaaacacacacactcacacacaggcttagctagcatgcaaaccaagcggattctccaagtgtttatctggatcaagttgacttgagtttaaatggcaagccgtagtttggagcagggtgctggccctggtggcccacagagggcctgaatctcagtggatcctgatcctcccctaggtgccccctctccctcccctatgtacatctatacatagagagggctccacgcctgttcaattggaccccgtgagtccatctggaggatgattaaaaggggtggaaggatgatatactaagtaatgtagaaaatggagtcttgtttactttaaagatggagaagacagtttgccaataaaacatagcactccatttcctctagaattctgttattaatattaatctgcaatgaactcctggcacctctctcacaaggccttccaaaggctttaaaaataataaggcatgctccagaagagcagagtgcattccagcaagatagctggaccaaattgccttctgctgggtggggggagtgggaaggcaggcagctggcagcttcacaaattaagcacattaaggacacaattagtaaaggaatgtcatccctccatctcttcagagacacccacaaacacagtctaaacacatacatgaattcagctcacaactttactcttatacacacgggctccaaagagacacacacaaacgcagaaccacaaacacacacgcagagacttgggtacaatcttgacatggcacacatgcaaaatacacgtttgcacacacagacacaacatatgcacagacattaggaagaaaatacgcagtgcactcccattgcttaagtgtcaatgtcagatgctgggcccctgcaggtttctgaaagtggcctgggggaagagggagtcagagtcccacagagaccctcctgggcagagcgcatcttttacgtaatcctctggcatgaaatggtgaaacgctgatacccccagacctcttgagccccgcagatgatgaggctttgtggccccctctccctccacacccagttctgaagaatgcttggcgtcaagcgatgcagagaccatcccagagtccccctgggtcctttccctggaaagcatccagaggaagtctgtggtggcccaaccctgcccaggctgagaatgagatgatatttggcaacctccactatccccttgttttaaagtcaataattttgcaaaacttttcatttaaatcattgaacagcgtaactttgagaaatgaaatacattttgtaggatgtaggcattatcgcgtgcaattgctgtccttctctgcccacatccctactctcttctcagcaagaagaggagcctggggcacctgtggccactttaagcaaggctaagtcaggacagagaggagccaagacatgggcaggaggagggcgagaagaggccgtgactttggtgcagtccttgagggcagctagtgtgagtcaagtgttgattaatacagataaggtcaagtctagaaggccaactctattaaactcaaatcttattatcacatcttacatggacattaaaacctctcagataatggcagctatgtgcactgagggtgacatcgtggtttttcaggcactggagaaattactttgacagggaaacttacgtgctgaaggcaaaacagcagataagcgagctgggccatttcctgagagtcatgagacaggatacaatgtggctgtcatgctaagtgacattcagtcccttcagaggtcggcctggtcatgcctgcgagacgtggccccagcagcagggtcacccttgggccacagagcctgcagagatggccagggctgcacatctgaggggacaccggcaggcgaggcagagcccacatggcctagtggtgtattggtttatgcaaaaacatttctcggttttttggatacctaatacattctaaaagatacttttttaaactaaataacaatggaagaataaaattgtggactgtgtgcaccccataatgcagaatgagcacgaaggtttctgtacatctttattcctagatgcttaaatgtcaaataaatcacaacaaaatattctctccgcttaatgccatattattaattcaatagtttctttttctcaactcagctatcagtaaactttcaggaagcctcctctatattatacacggaaagcacaagggtaaatggtatttgtttcctctgggaaatatttgctgattgtagaaaattgtgtgagatccttcccacttatggagaataccttcatgaggcagaatagatttcctcaaaacttcaagagtgagcctagagaatcaatgcatgcacacatgtacacacatgagcacacacacacacgtgcagtggtgggcagtggatggcccccaaggtccccgtccctgctatagaatcccctccccagggctgtgaggtatgggctattctcccccagtgaccgctccctctacagcaacagggattctgcagaggtaattgaggtctcttgtcagttgactttcagttaaccaaaaaggagattctcgcagttgtgagcctgacgtgatcaggtgagcccttacaagggcccttctggagggagagactggaagtgagaaagggccgtgccagcagccccgacacaaggagctaggggtgaccactaacaaggagctaggggtgaccactaggagctaacaaccacccccaggtgacacccagcatgagaatgggcgtccctatcctacaattcaaggaactgaatcctgccaacagtcacgtgagtctaaagaaacagcccaggcaacgccttgatttcagcttcctgagaccctacgtggagaggctagccacgtcgggcctgaacttctgtcctaaagaaactgcaagacaataagtagctgttggttccccgttgtgtggtaatttgttatgcagcaataaaaatccacgtgctcacaccagcacccttcccatagccacctgcttctgagtccattccataaacaattccaataatcaagaccatggcattcagtaactcctgcattttatccctacgtctacttcccaaatgtcctgcaatgtgcacacacattcactcacacacacactcacacatgcactcacatgcaaatacatacacattcacacactcacatgtgcactcacatacaaatacacacacatgcactcacatgcaaatacattcacacacatgcactcacaaatacacccacacatgcactcatatgcaaatacacacacattcacacacatgcactcacatacaaatacacacacatgctttcacaatcaaatacacatacattctctcacacatgcactcacaaatacacacattcactcacatacacacatatacacattcactcaccttctcacatacaaatacacattcactcacacatgcactcacaaatacacacacattgacacacacacatgcactcacaaatacattcacgctcacacgtactcacacatgcgctcaaatacacattcactcccacactcactggcacactcgcacattcattcagtcacacatacacacacttgcatacacgcactcagtcatacacacttgcatacacgcactcagtcatacacacattcaaacataaacacatattcacactcatacacacattcactcacactcatacacatacacagtcacacacatgcactcacacacagggactcacatacacatactcaaatacacatggactcacacacgtgcagtcacacattcacacacacattcacacacaggtgcacacacacaggcactcaccttcacactcacacaggcacactccagggccgtcttgcaaaggaagcaagttctggggaggatggaagatgggagggttacatgtgagggacggagtacagaaggttcttaaaggcaggagtgggaacgggagcctggtgggtgcccagaaggtggcagccgggttccgctggagtctgagctctttaacagggaaggtcggggcctggagctggcgaggggcacccacagtgtggatgtggcggagagctctgccggccatgaggaaaggggatggcccgagcaggcaccatcacccaggtcagggcttggcatggatggcggcggggggctcccaagcagacctgctgcgcaaggggctcctgccagcagagcaaaagcaagggcagcacggccctgccgagggacagaagcgactgccggagcagaaaccgggaaaaaaagggccccttgtcccacaagaagtcagttgagagagaaaaagagcaggcccttatcccaccagggtaagtgcccccggcagaaaacaaaacaaaacaaaatgagaggatgcattctcccctggtgccttcacgttctcagctaaagacctgtggcgcccacagtaaggctgaggacgccatggaggcaaaatgccatgcaactgtggggcctgcatgcggctccaggaaaccaaaacccactggggctcagctcctctgggaagcagccaagcaggtgccctgccctagcaggaccatgcctactactccccacacagcctttgcccacctccccctcgcccacccggacctgcacccctgggagcttgtcacacgtgttcactgccctgccaagcccctggggatgcccttgtgtttggccgtaactaagtcctcatgttgtgatccaatcatttccctcagggagtaagggagttcaagaagaccatggacagggtgtttattacacaacttcttcacagtaattctcctgccagtactttctcactgtttaaaatcaataaggaagaggtactgtattagtccgttttcacgctgctgataaactcatacccgagactgggcagtttacaaaagaaagagttttaattggacttacagttccacgtggcaagggaagcctcacaatcatggcagaaggcaaggtggagcaagtcacgtcttccgtggatggcagcaggcaaagagggagaaattgggcaaggaaattcccccttacaatactgtaagatctcatgagacttattcactatcaagagaacagcatgggaaagacctgccctcgtaattcaattgcctcccaccaggtccctcttacaacacgtcggaattcaagatgagatttgggtggggaaatagccgaactatatcaggtaccaagggtaaaacccagggagcagctgaggggccaccaggggcgagaatgagaggagaggtgaagggcaagtccaggaccccaggagcgtgggtcccaggcagaggcagccctgaatgcagggagcagaccctcccctcctccagcccctctgtttgccaccaaagggctgactctctgggaaccaatcttacggtgaccactgagcgggcaggaagcttcctgcaagttgaaagcatgaaggagagaagaagaggtctcaggagcacaagccaagtggggctggcacaggcgagcaggcagagaggaagcacacagcaggggatacagtgaagggggcctggggtcatggcaggcgattcatgtggccagggtcccacctccctgtcagagtgcagggcaaccaactggtctctgggtcaggatgctgcctcaccactcaccgttgcacacccctgccagacagaggcctgtagctacctggattttcccccagcagaaagaatgtggacttcagtgagtgaaagtcttcatcactggtggtccaagatgctgatcaaaacagagcttcctcctcagccttgaccaatgacagatgttctgataacattactgtgtatggcactatcacagaccaaaatttatagggatgttttcttgaatctaatttttattttactacgtattttttgaaataaatgcatattttcctagacactgagtcaattccataaacacctgtgggtgccagcaggcgtgctaggagcagaggccattggagacatgaaggctcctgctgctgggagactcaactggccataacccaagtgctatgtgttgggtgaggaaggcttcacccaggaagggacgttgagcacggataggggaggagaggaccaggtgggatttgctgggcagacaaaagaaaggcagtgcagaaaggaaataactccttcaaaggccaagatcttgatgaattaaactaaggaagtaccaatataaataaagaaaggggggaatatgagacccattaaaggagagtgaattccaaaggccttccataacgggggttaaggagctgaggcattcaccatgaccccctgtgagggagcggaaggtggtatcaccagtggagacttggaagaggccggaggagcaggctgcaggaaggaagtgagttcagtcttgactgtgtctgctggacattccaaagctgctgtctgctaggcagtgaggagttaggcaggttcatctggagaccaaggagcagggttggtggtaaaaataatgataataataattaattaataaaaaaaaaaccctggagtgtgagttactcagaaagagcatctgttaaattagcagagagcagagccatgtggagcacacatttcctacagagtttgtagggtaaaaatacataagaggtgggtgcagagagagaagatgtggttgcagagactgatgaagaacagacattgcaagtaagagcaagggacatgcggacccacaagcattatcactgtgagctggggatcaaagcactttctgggtgccacgtgcttcatcggcaaggcctcttcagtcttcccaaagtttctgtgtagttacttgctctcttccccattttatagatgagaaaaagaagtctcagagctggtaagttatgagtccaaaatcacacagctcttacctggtgcagctgccgttggaacttaccacaaaaaaaaacatgctctttccactctgctgggcagcaccaggtttgtcacagaagaatgggaaggtcacaccttcagattctagaaagagaacgggtgagaggcgtgactgtcacctgcctacaggagagcagttttggtggagtttgagaagtcgcagccagattgcagagactaacggaggggctggacggggagcgacataggccagtttctcttgccagaaagaagctcaaccatggcatgagacaggcctcactcgggctttgcagtgagggcatttttgttttctcttttttgttgctgttggtgttttaagcttgtgcatgttcataatctgtgggggaaagagtcaaagaaggaaacattgaggactcgggaaagcaagaagttaaatacaggaaagaacaaagtacccaagaggaaaaaggtgaaggtgtcaagatggagaaggagaaattatccctggatgagaggacagcgcctttgattcagagacctgagaacagcagggaagggcatttgtcggcttggggccaggaagctgaaggaatcttcttctaacctagggaaagatgtgcatgccagcaggggctgagatggggcagtggggagagggaatggaggagcatggtaacagtggaatggccgttccctgaggaaggagagcatacccacccgagccccatgtgcagcacagcaggagacctcacaccagtccttgaccaatcgcataactctcctatcttcttggccagccatcagttgcaggtaagcaggaggggagagcagatggctctacgggttcacagttgggcactggcagaaagtcaaggggagagggactggcaggggctggagtgaccttcagaagacatttacgagaagaaaggcatgttgcaatatgtgttgtaatgggaattggcaagacctttataccaccaagcatctaaggatgcagttttgaatcatgtcgagacagctctacttggagctttgtttaaaggcttcctaatcttctcccccacccgcctctctttcaacacatagtagataaatgctaaatagacaaatgtcccagttagcctcagtaacagaggaagcctcagtaacagaggaaacccaagctgtagggtttcctacatttttccatggaggaaaaatgtgaaatgtccacacgcacaggtggtgctctgtccctggccgcactgcatgtggcctgggtccctgatgccattcctctccaggaatggcaagcacgtcctttggggctctgcatcctcagagctgtcttcttccacatgcttctccttgcagcagtctttgttcccttatctgtaaaacagggcccaggacttcaggggctgcagccctttaaaattctagcagttcgtgagccctcctcctccttcagcagctgctctgtagccattacttctgcatcctcctaagacactatagaaagggtgcacccagccccagaatgctgggtgactcagcccttcctagcttccagatggatggcaagcccagggctgccagcaggggcatgggctggggacagaaaacaagaatgaaaaagaacagtgccttttggccatcttcccagagtcttgcacctcgtcaccacagtcttattaaccatttggtccaaaatattaccttaaaaaatgtgttgaaagtaagccactttttaaaaatcatgcaactgtcactatggaaaacagtatggcgttcctcaaaatattcaacacaggattaccatctgatccagcaactcaactccatttctaggcatatatacaaaagaactgaaagcaggatttcaaacagatatttgtacgcccgtgttcatggtagcattgttcacaacagctaagaggtagaaccaaacccagtgtccatcgatggatgaacagataagcaaattgtggtatagacatgcaatggaatattattcagccttaaaaaggagggtcattctgacacttgctactacatggatgaaccttgaggtcattatgctacctgaaataagccagtcacaaaggacagatgctgtttcattagacttatatgagatacctagagtagtccaattcctagagacaaagtagaatggtggttgccagggcctgggggaagggggaaatgtggaattgttgttcaatagatacaaagtttcagactttcaagatgaaaagacttctgtaaatggatggtggtgacgattgcacaccaatgttcgatgaacttaatgtcactgaatagtacattaaaatagtacttaaaaatggttaacatggtacatttcatgttatgtgtattttaccaagataaaaaaaaatattttaatcatgcaaatgcttccttctccttccctactccaggatcagcagccacacttctgtcccaaggagtgaagctgagtagagagcgcaccctctgcctgggacctgatgaaagatccaagcagacagcggccccctgcggaaccgtggacaccgagctgcctcctgttccagcaacagcctggacccccgactctgggtgcagggtcctcaccggtgtcccgtgacagccgacacgcactgcgcagcccgagtcgactgctcccactccgcgctcccctcctggaccccgcgcagctctcctgcgcagcggccaggctaccttcccagtctccatcaaagacataaattatcgaaattctgccgctactcctgacagaagcgaacgtgaggggtctgtgggcctccgaccctggaaggagcgcgcggtgccagtgttggatgaggacgcagcgtcgagcaggagaacgcagcacggaggagggcgcggccggcagcagggcgcagcaggcaggctgtgctgggtcccctgacgctctcccctgcttgttccacggccgccccgcagcgccctctgccggcccagcccagagcgccgctccccgacacagcgcgcgccggatgtgcgcgcccccaggacccagaagctct

SEQ ID NO: 501 - DNA, 42175 bp, Homo sapiens
acctccctagctcaagcgaccctcctacctcatccacctgagtaactgggaccataggcacataccaccatgcacagctaatttttcttttttacgttttgtagagatgaaggctcattatgatgccctggctgatctcactttttttctttaatattctgcaatttcataactaatatatgaagatgtggatttttcttctctctctctctttttagagacaagctcttgctctgtaacccaggctagagtgcagtgacataatcctaactcactgcggcctcaaactcctgggctcaagcaatcctcccacctcagcctccccaccagctgggactacaggtgtgtgccaccacacccagctaatttttttaattatttttttttaagagatggggcctcgctatgttgcccaggctagtcttaaaactcctggtctcaagagatcatcccacctcagcttccaaaagtgctgggactataaggcttgagccaccacccccagccctttctttctttctatctgcttgaaattcattgaaactcttggatctaaggattaggatctttcaacaattctggaatgttgtcagccattatttctttaaatgttgttccatctctgttctagcatctccttctaccattccaaatagttataaaacagtctcatttttcttccaagtcttttaccctcttttcatattttccacctccaagtatctctggattgtattctaaggaatacttcagatatgttctctaggtcactgactcttttcacttgtgtttaatcttctgtttaattgaaccattgagttttaatttcagtaatatatcttttatgtctagatattctatttggatctttttcaaatatacatgttcactgttcatattttcaatcttttagaatactatctaacaatattaaaatcagttatttctgcttgttctaatacacaaaggctttgtggctttctgctacctgttccttttgtgggttctcaccatggtgtctggtattctcgtttgctttgcaaattttgactgcagactactcatttgtcctgaagacttttctgtgggaatgtttggtggtttgtgtagcagctgagttcttcaagataagacttgtatttgccttggggcactgccaacctaaaactactttatacttaattttctatttcaggcttttggaagcacacaagtagtttgatttcagactacaaagccatgtaggggctgacttgtcctgagaaggtaaattcttagagatatgtgtttccttccagcaagggctggagttgagacagacaaggtttctgggtattcccttctgccgagtttatttatcttgatcacccttctattgtgaatgtagccctttgagagtccaggtttatgcagcagtttactgttagactctccatcttagacatatcctaagctttatctcctggtcctgattctttatgtaattcttcctctttgtctctaggatatagtagacaactttagaaaaaagccaagtttgctagcctcccattcatgccccctcaatgttgtttgaaaagatatttaaaaatacatcttgcagcattttggttgtttttatcaggagggctgttcatggtaactaacccattattatgctggaaacagcatatttcattaaataactttataatgagtaaatataaatgtaaacttatgaagcatatttatattaataagttaatgattttgtcttctgttatctattaggcttccatgcaatattcttttttcagaaaaggattctactctttacaaagttttgaaaacttcttccaaccattaagtgtaatgctttctccttataatgctactaaatcttctctagcttgactaccactgatggtatatgaactgagcctcagtctatcaccctccttacaaggtcaaataattcaggtggaatgggcctaatgacatattttcaaacttttaattttgttttcttaccagtaaaacctcttctacctagaaaactttctaggtaggggttttctgctctggatgcaggggctagggaggaagatctggaatgcaacggatttggattcctccacccctttcctgaagtacctcatgaactctgaaaatgttcgcttagggtttcagctatgaggccttgggcatttacttgatccctctgtacctcagtttcctcatatataaaagagggataataataatgctaccctaacaagattgctgtaataattgaataagttaaatatgtgaagcacttagtacagttcttggcacatagtaaacactatataagggctaattgtaaaaaatacaggagagctaggcatggtggctcatacctctaatccaagcactttgggtgaccaaggcaggaggatcacttgaggccaggagttcaaggttgcaatcagctgtgcacttcagtcctggttacagaccaagactctgtctcaaataaaaaacaaaaacaaaaaaaggagaatttttatttaactctacatgcttttgctaagtatttcatactcctttgaatttttacaagattcagaatttttacattacttgtccaattttatgtaaaatgcatttaaaaagtaaaagaagaaaatgatctcaactttagagttaaactaaaaccaaaggtctctatgttccatgttgtttttttttttccatacattgctttcttctagcagtgagaactttctgaatccattaaacaacagccaggcatggtggctcacacctgtaatcccagtgctctgggaagccaaggtggaaggatcacttgaggccaggagttcgagaccagcctgggcaacaaagcgagaccctgtctctacaaaaataaaaatttagccgagtgtggtggcacacacctgtattcctagctacttgaagactgaggcaggaagatcccttgaacctaggagttcagtgaggcaatgatcatgccactgccctccagcctaggtgacagagcaaaacactgactcaaaaaaaaaaaaaatcagctttcagatatttgggtactaaagaaaaaaacaagtaaaaacaaaaaaccaaaaaatgctgcagactctgtggacttttcttttcactgtaattttgtcctgctgtaaggttagtagaaaggagaagaggagatcacaaggctgaggcagaatttgtgtgttttctgaggatggtaccctttgtgtgaataaggggctagtgcagctgccagtatagaaggggccctgggagaaggaaataaatgagctaaatgaggaacctgtacaggagcacaggaaagagtcaaggaggaaaatgctggctttcacataccctccttgttttgaagacaaggaaactgagacctggagagctgtagggacttgagggaaaggagaaaatcctaggtctaagcttgggaaggggatgccaatctacctttgcttcttcaaagattactacagacttgatccactggggccctcaaagtatgtgaggcatgggagggggcccaggaggggaataaaacaacttgtactgaataatttgaaatgttcagtcacactaaaactgcagagccacaggccagctggaaagtcagcttttaaaaatgctttacaaagagcactgacccaagaacaagaagacgtgcgttctattagactgaggcatttaagactgtcatttctgtaagtcaaaatggtgaagtagtgccagcttcataacagctcaaccagggaatctacctccactgctctgcagatctttgggatttgggtagggtccccacatctgtctagtggatgatgcctgccttacttagtttatagggtttctgtaagcactgatccaaattacacaacatttactgagtgcctgctgtggataatttctggggaaataaagatgactaaagcacaacccttgttcccaaggacctagcagtggaggaggtaggaaaacaaacagagttggatctattattatatatataatagataaggaagggagagaggaaacaataaagtcggcttgattgtgggttgtcagggagatcaaaacatttgaattggcctccaatggttaaacagagtttcccagacaaagggatgaggtagcactagcaagaggaatagtttgagcaaagccatgaaggtgtgcaagtgcatggtgaattgaggaatggtaaacagtctaattggtctaaatgtagagagtatggagggaggggtaagtaaggttggaaaagttgatggggcaggtagtgccaatgtatagaaatgactggataagaccacatccaggaaaaccatggcaaagcacagaagtactttacaagtgataagtactgtttaccttaaagacataaaacaaagcttccctaaaatctcacactatccctccctcttctcacgagggctttggcttgagtcatagattgatctactaggtatctttatagagtatttcctttccctaggagaagtgttctccccagggtccaggaaagtggcagatggaaactttcagagtggtggagggtaggggacaggaagtgatccagattgggtgaggaaggtgctgtctcattattccccaaacttctatcttccctttttccatatcatgtattctaatctcccttaagaaagaagtgaaactgctacacccaagggagtagaggattggtgtgtcacactcccctgtgctcccatcccccgcttctcctccacttctgcccctttgcaaaatctcccagaatgaagtcatattgtgttggcaaacttagtcataatccccatttcctctccttatcagccaggacctgtcttcttccactgattccactggtattgcttccagtacccagcaatatgttcattcatcccactatatcctcatagatcctcttcccattcaagagaaaccaagcttgacaaggagatgaatcaaatataaggtcctgggattcaattatgccccattctaccaatgttctccatgaactaagagaaagagccagatagccctaatatcagattctggctttgctacttcttacctatgtgacgttttgcaagagccactatttcttcacttctaaaagggagacaatcatatccaaactccagaaacacagtgacattagagataatatacatagagcatcagtcttacagaagacgccaaacattgcagctactactatcatcattatcatcttcaccacaaccaccattattaagcatctgaattaatgcagactcctggctggtctcatcccttccctcttattgccctccatctgtttctcacatgatagtcacagcactagtttaaaaataaaaatcaaatcacatcccatgttactcaaaacccttctttggcttctcaatgcactctgaatgaaatccaagcttcttcctttggcctccagggcccagcccaaccaagcttctgtccccttctctctacagccccttcacattatgctctccccattgcccgctctgctccagccacactagcactctctgttcactgagcactgcggcttctgtccatctcagggcctttgcccctgaggttttctcttccctgtgtctcttccctttcatatgttcctcacgccctttgggtgcagtttaaatgtcaccttctctgactacactaccttagtaccattctactttatcttctttaccagtccaattcttttttatcactgttcattaataacatatttgtacaactatgtgaataacttctatctccccaatagaaagtaaactccaggagggcaagacagtttgctttgttcagtactgtatccccagcacctagcccagtactagaagtagtattttatttattaatgtttttaggcagcactccatgctgtagtacaagcaaatgcaaatccagcatcatttgtgccctcaggatctcgaggaggttaggatttccttacaatcattcccagttgtgtctcttttcagagaatttactctctaggacatcaaaggtcaaactttctcttttctgtattatctaaattttccacaatgagtatgcatttttagtaagaatttctcataaactcagcattgtaacaagactcatcacagcaaatcagtctgattaaatgaatttattttgaaagtaaaattcacaataaaagaagaaagtccaacagccaacttaacattcttaaaggtattagcatttaaaagtgggaaattgctaatcaaagagcattgtctgacatataagaggttagtgattcaataaatgattttccagctgatcagatgtagataatatgacaatgtgaaatgaaaacattcatgcagcaccccatgagttaatgatggtggaatacatagtccttggcatgcaaagggtgctcaatatttgttggatgtaagtttctggaagatttcttcagccaaagagaaaactacgcaaatttgcatctttgaaaatgaaaatacctcatatatttctcactgttgttgttgttcagaggtgaatgaccaactaataaatttctatttaaattattttatttaattattatttcttgacagattaaaatctttcaggttgtttccctaatttaaatgtatgtcatttcctctgggatgttccccacccacacacaagcatactccttactctctccctccttttccttcaaaagcactatttcctatgattatctaaaatgtgactttcccctggtgatgccatattcttaaaacccactccattttcttgtgtgcacatttcccagggctagtagagaaagcctttctaaccccatccccaaccctgggcccaactacttaaactaatctctttcctttctggtcactagggaccctgacctccttttctgttcactattgcctctgctgctgtcacccttggtgatttcattgctgttgtcacccttagtgactgctttgactctttaacactcctcagcagttcacccaaaaaatctcattctgaccaccatcatcatcagaacatctttctctctaagataaggaacactggaattcttctgtttatgaacaaactcccatctttctacttcctccactcccatttaaaaaattcctttttgaaccattttttaaaattgtggtaaaacatacataatataaaatttaccattttgaccatttttaagtgtacggttcagtggcattcacattgttgtacaaccataaccactctccatctccagaacatttttttcatcttccaaaactgaaactctatgctcactgaacaataacaccacattccaaagttaattcttttttatattctctaaggatctgtttcagatttttcccacttatacttaaaacttcaaaccaatgcttatttctcttaatctccgtctctttcagaacctacattacaaagattgaagccattttataagacccttaagttcacatccctagaccttaaaacttcacatcttctctcattctctcactagttcctcctctactgcaggaagaagtgtgcctcctccttttcaaagctgatccttccacttgtgttctttccccctctcttctgtatctcctctggaaatattatgtaagttttcctcttttcattggctactttctttctgcattgaagcatactcaagagtctatcacatcccaatataaacctcaatattaatgacaataataataacaaacatattgagtctctactgtgcaccagctactgtgctaagcgctgaaaatatatcttctcatttaattctcacaacaacctaatgagttaaattatgaaattattatgggtaatataacagttattatgaaaattttcattattattaagaaactgaggcttcagagacatcaagcaacttgtccaaggtcacctagctagtaagtagcatcttcccttctccacactactgtgtaaagataccattctttctttctttgttccctttcattactgtattatacttcttggaaatgtcttacttcctccttctccactctgcgcagtccagtgcagttgttttgagattcccaccatacttaaatgactcctccaatgtctcttaatcttcaaccaggtctctatagtactcattaccaactgttcctgctttttgagacagtgttctctcttagccttcataatatgaactcttcttttttctgcttctctgtctggtcttcttattaacttcgtttctcctctttccccttacatgttagatattccagagtttcatcttcttacagctttctcttcctgctccacactcagccaagacaatctcattcactcccacacaataaactatcatgccttcacaaatgaagagcaaatccacatggctaagtttggcctctggccacctagttccaactccctgctgaaatgtccatataactgttcctcaagtacctcaaactccatctgccctacatcaaactaattccctgtccctgtcactgaactccccacctgagtttcctattattaaccactggaattatgtccacttcccttcaccaccctgcttcccctcatccccagtccagagcaggtacacccacatccagaaagagccgaggaggcattgtggcagacgtgcccctaaactgggagtgagacttgggttttaatcctgactcagccacttggtaactgcatgacttagtggtacagaacaggaatctctggggcccttactcacaccaacctgcaaggactctatgaagtacctgtagcactcatcattccatcccctcctcgttagtcccattaacattgccctcactaggtcctcactgctttttgcctgggatattttaactggcctcctaactattcattctttttgcctccgtctccttctttccttccttcagatggtgcttcacacagacataaaattatattcacaaaacacactctagatgatgtttctcatttgctttagaaactttcaaaagattcgtgttgtccacaggataaaattcaaactccttattgtagcattcatagtcctctgcatactggtcccaacataacatgtgaaacttcactttgtctgaactgaatttcaaatgtagttgtggtatgtatttggaaggaaaaaaaaatcccaaatgtattcttttttcactatctttatttttttcatttttggtgacaagagtctcactctgtggtccagactggagtatagtgctatcagagcttactacaactttaaacttctgggctcaggtgatcctcccacctcagtctcccaagtagctaagactgcacgtgcacaccacccagtccagctaatttttaaaaattttttctgtagagacaggatctctttatgttgcctaggctggtcttgaactcctggcctcaagtggtcctcctgcttaggcctcccaatgcactgggattacaggcatgagacacacacccagccctgacttattctttataccaaaagtaacactgagtcaatcaaagatttatgtataaactattaaacattaaagttttagataatatcataagtaaatttatttataatcttggaagagaaaaggtattttgaagcagaacacaaaaccagaagttctcaaagaaaacactgattatattttaccacataatatttgaaaacttatgtatggccaaaaaatgccattagtgaaatctaaacataaatgacacaggggaaaaagttgtaacacaaatcacagacaagggtctaatttcttagtttaggtagagtccttaaaatcaataatttatagaaattaacaatacacattttttaaaagatgctcaatctcatgaaataaaggaataaaattcaaaactatcagatagtttacactctttagaaaggcaaacatttcaaaggtaatgacactcattgttgctagaaagatggagaaaagggtactcccctggattgttcacaaaactgttaattaatacaagtttttggaagtcaattcattaatatctgtcaagctataagatacatgtaccctctgatccagcaattccactactaggagtttatgctaccaataaacttataaatattttcaaagaatcacaacatacacccacacccacccacacccatacacacacacacacacacacacacacacacacacacacacaactgtcagttgcaacactggcaatattagaaaacaaaaacaaaaataaaatctggaaacagccagtgttaatcaataaaagactcgttaagatatatttctatgattgaatgctatttataatgttacttgtaaaagaatgtttctaatatgtgaaaatatttatgatatagtgttaattggaaaatgcaaaaaaaagcttaaaatatatttgcagtatgattctattttttaaataaaagagatgtgtataattttttacatagaaaaaagaatgtcaggatctaccacgcatacactttcctgtcatttacatattttctaagtgcacatgtatcttttttataatcagaaaaaaattactttaaatgttttcaactttctgtagaaaagagaaaggaaattaaacaatctgtgtccttctatattatatgttatgcaataaacactgcctagagcctatattgcaaagattttataaaagttaatgattaactaagtgtaactctttgacagtgctacaactaggccgggtgcagtggctcacgcctgtaatcccagcactttgggaggctgaggcaggaggatcacttgcggtcaggagttcaggaccagcctggccaacatggtgaaaccccatctctataaaaatacaaaaaaaattggccaggtgtggtggcatacaccttgtagtcccagctacttgggaggctgagacagaagaattgctttaatctgggaggtggaggctgcagtgagctgagatcgtgccactgcactccagcctgggcagcagagggagactctgtctcaaaaaataaataaataaataaaatgaaagtgctacagctaaaataatctctgtttaggatctgacggtaggaaaaagataagctcccacacgttctaatgcatttaagtagctccatctgcattgcctcatacatcaatactgtcatccaatgttgcttaatccatgtgtgtgtgtgtctatataagtagaactgggatgtaactgccttaaatactacaattgctgactacaggaaacctcatcatctgagaccagcactttataaattaggtgagtatcataaccagtgtgcagggatatctgctgtatatcattgggaatagcagcaaaaaagaacaagtgatgttcctattgccatatgttctgaaatatttctgatataaaaataggggagtaatgagtcaattttagtatgaaaaaaatggtgaaaagagtgatcaaggcaaagaatttgcaggttatttgaagaaaatactttttcagaataggatttgaaaatatttcctgactatgcttttgacttatcatgtggttctataaagggtgttgactttctctgtgtcaatgactccattgtaaatgtggtattttcagcttctctatcttgctcaattatacaagccaatactggtttacagcaaagttcttccaagtgcgttctctcaaactagtccatgagggtgataagacgggagaaaaaggttatgagatcaaataactactgaaaacaatagttaaacaaaggtacccatgagtcttcaataaaggactatcaacaccttttctatgctaacatgactctgactctcctagagatagaatgtagattggaacatttcccatatttatttgaaaatataactttttgttaaaatattctaagattattaaaaaaagtaacttttttgaatgaccaggaattgttttttctaggatataagtatctttgggtagaagagaaaacaaacaacgtcaaggcaatgcagtttttatgttagtaaagtgttacttcattatctactgtgtgcaggttactatttaaactattttatatacaacttaaaatacaactacaattgggttccctatcttattattccaaatgcgtgattacaaattaacaaccatattcagaaacttattatttcaaagaagttggacaactgctttgtgtataagaaaggctgagtgtttggagttaaattcccagttctgattattttcttcctgttttgaggcggaaagggagaaagaatggagggagacaggatagggaagtactggcatcaagatggaagtcaggaggctagattctgttcctggttctgtttcataatcctgggtgaggcacttaatcttcagagtttcagtctactcatctgtaaagttaggggctcagtaaaatgatatgtaagatcctctgcttctaagcattcttgaccaaaaaaggtaggagaatcagaggaagaaaataaaagttcatgtgaggtcttcaagctgtgtgagcacaacatttactcccatggcaagactgagggacagaataggtagtcttcaactggctgaccattgaggattttgcacatgggactggatgtaaataggtggcatgcacataatgttatagcagttctacctagacaagatcatctggagtttcagcctccagaggtttgtccagggacaaaatagggtgcctaaagtttaccttctaacgagtcctctaatccaagaactcaatgctcttcttttaactgctagaagagattattcatatgaagctcataagagatttaaattgtaaccactgctgggataatttggtttgtttgtttgtttgtagtgtggcaaaacaggaggccatacttaaaaagaagaagcaataattattgatagaattgcaggcaatgtcagagagtttaagactggagaagaagtcctgctccctccacaaaccacagcacagtgtcataccctgatgtcgaagccagattgcagaaccatactaagagaatatggaattttctgcaatttatgatacagaactccatattttttcagtacgatacagtgacccagcttgatcatcaaggtatcacatcgattgatgtcccttgcttgaatcaagtattaaattgggggttgcaagatggtgatttgtctgattctgagagagaaagaacaaagaaaccagctaggcaaatagggcaaagtcctcggcagaactgctcttctaacaaagagcagcctgagagatcaagccgcaaacatagaaaaggaagcaagctccagcacaaaagagtgccttctgtgtaatcagcaaatttcaaatttcatatacattcagttggcctcagtgaacacattcctttccttttttggttatattcaaataaggaagcttgctcaggagggcatgcttggaacatgcctacagctacacagataaggggagttacactgagctaggcatgtccacaatggaggattctatccccaacacgtgcacagtaagggaagtcaaacaacatgaagtaacttaggctacgagcccacatgcacactggaaggacagcgtgggggttgtcagaaattcatgccttctgcaaatgacacacctagtcctaaccagtttttcacaccttatgtaaataaagtaccccctccccactagctcatttataaaaacccttgtattccactatagaatagcaaccctttttcagggcccctctctgcagcagagagctttctctccttctttcatttattaaacttctgctctaacctcacccttggtgtgtccaccttccttgatttcctcagttgtgggaccaagaactccgggtggcatcccagacaatgaggcctatttcaatgctatcattccttctgtaatgactagacccctccctattcaactagcctcactagttttttagtgactctgctttctggcacaacaggatgttccatgttcaccactactttaccagctccagatctggagcagctgttcctttcggtggagaaagtactaagaaactaagatatgggcacactgatattgctgactcatatttaacattccataggttttctcatgacttcttttatgtttgtgtctcctttcccctacagtcaaaaccatgtaacataatgtatctacttatttgctctatactaaagtataacaaaacagtctcagaacttcagtaccagtatttccactatctacaaaaagagtccaactttgtaaaatagttgaagagatttattctgagccaaatatgagtgaccacggcctgtgacaaagccctcaggagatcctgagaacatgtgctcaaagtggttggtgtgcattttggttttatgcattttagggagacatgagacttcaatcaaatacatttaagaaatacattcatttggtccagaaaggtgggataacttgaagcgtggggtggaggggttcagctgggagatgggtaagggataaaagactacagtcaactgggatcaataaaaaggaatgtctgggttaaaataaaggattgtggaaaccaaagttcttatttgcagaggaagccttcaggttgtaggcttcagagagaatagattataaaatgtcaattctaatacagtggtatttgtgtatctaaacatatctaaacacagaaaaagtaaagtaaaaatatggtatgaagatttaaaaatggtgcacttgtattgggcaattaaccatgaatggagcttgcaggactggaaaatgagtctaggtgagttaataagtagtgagtgaatgtgaaggcgtaggtcgttactgaccacgactatagacttcatgatcactgtacacttagactacactaaatttatttaaaattgtttcctttttccataataaattaaccttgcttactataacttttttactttataaacttttagtttttttaatgttttgactcttgtaataacacttagcttaaaatacaaacatcatacagctgtacaaaaatttcttcctttatatccttattctataagcttttttctattttaaacatttttaattttaattttttactttttacgctttttccttaaaatctaagacacaaacacacacaccctagtctaggcctacacagggtcaggatcattaatatcactgtctttcacttccatatcttgccctactggaagttcttcaggggcaataacatgcatggagctgtcatttcctataacaatgtcttcctctggaatacctttttgacagaactgcctgaggctgctttacaattaacttgttttttaataagtagaaggaacacaatctacaataatgataaaaagtatagtatagcaaatacataaaccagtaacatagtcatttgttaccaagtattatatactatgcatgattgtatgtgctatacttttatacaactggcagtgcagtgggttgtttacaccaccatcaccacaaacacgcaagtaatgaattgttctaggatgttatgatggctacaacagcactaggtgataagaatttatcagctccactataatcttgtgagaccaccattgtatatgtgcaatccattgaccaaagcctcattatgcagtgcagagtaccatatcctagcatgaatgcatagttagaatactacgttcaaactttactgaaataattatttcctctatatggttatgttaccaatttggtagtgagctagccacagttgtttccgtttgtttttaagttgagacaaatgaactaatattatattttaatccaacagaatactgaaaaatgaagcctaaaatgaagtattcaaccaacaaaatttccacagcaaagtggaagaacacagcaagcaaagccttgtgtttcaagctgggaagtaaggacttaagttatctctgaatgttttacgcactatttttatctgttatcaaatatttatactccaatgtttatacatgctatcttatcaaaatctactaagaatacaagaactaaaataaaaagagatggcacataagggtataatacagcagactggttttgaaccaaccatatatagccaactttggcatatttgatacatcaccaggcaggaatagctgagataatctgaacctgtgaatagtgataaacttaattatagccttttatatcaaccactttttgctccacacacctcctgctgccaaacccccaaaaccttttccctgataaactagcaaacttttaagcaggtccacttttattcaacaaatattcattaagacctttggtggtatcaggcatgtggtcttaacttgcgactactgatgaagaagagaataacagatgaagatatttgaataatcatcttagtcaatttgtgttaccatagaaatatacctgaagctgggtaatttaaccctttttccatttagaaaaaaaagtgcagcttgctgccagcgcttatttaattttacataaacatctctttgaggctgaagcaaatctgattttcaatgcaaaaatagaatacaaaaactgttcttggagttatttctaaacagaactaccatcagcattgtctatttcagaaaaaatgagattcaccaaatgaaacttcagcaagcaactaactgttcaagaagtgttcaagaatgttaacatcacatgtaggaatgctacattttccaggatttgacattttcagcgatcaagaattactatattttatcaatgaaaataccactactaaaaacataaatagaatgatgtcttttgtttccaaagttgatatactagagagatgtaaaaataataataaaagcaagatctttcgtggcaaagttatcttaaacactgcagaagcactgccagtaattattctctgggcaaatgggaaagggttaaaaacaaaagaggtttatttggtttacagttctgcaggctgtacaagaagcatggtgctagcatctgcttctggtgagggcttcaggctatttccactcatgatggaaagggaagggaaaccagtatgtgcagaggtcacatagggggagaacagagggagaacagaagcaggagaaagaggagaggagggaccaaccttttttcaacaaccatcttgcaaactaagagtgagaattcgctcttgtgagaatggcaccaagctgttcatgagtggtctgccccatgatccaaatacctcccacaaggccccacctccaacaatggggatcaaatttcaacaggagacttggtgggaccaaaccaaccaaagccaaaccatagaaataaagcagaaccaacaaatgatgctcaagtctatctagctgcaaactcagagtttgtagtaagacagaaggtaagtaaagtcaggtggcagctatagctctgagattaaagggctgtataactctttgatccttaaaattatctgtcctaggaaagaagcatgcaaatttatttatttatttattttctgttgagacagtctcactttgtctcccaggctgaagtgcagtggcaccatctcatctcactaaaacctctgcctcctggttcaagcgattctcctgtctcagcctcccaagtagctggaattacaggcacacaccaccatacctggctaattttttgtatttttagtagagatggggtttcaccaggttggccaggctggtcttgaactcctggcctcaagtgatccacccgcctcagcctcccaaagtgctgggatcacaggcatgaaccaccgcacttggccagaaagcatgcaattttaggatctgtttttcatatgggagtagtaacacaaaagtaagttaatggagccttggtgaacaggaaagaaaatggaggataaggaatgatggtggggactggcataaccttgtccttcatgctcctttccatttctctgtacatctttaaggctagaaaagaaagcagagttaatatcatttctgtctcattctgtcttccctgaggctgtggcccacccacactgttctttggtgaccagggaaagcactaatttgactgtggtttctgaacaaccaggaaatcacagcagaaccaatccttttacttgtagctgagtcaaaatgctctctgtagaaacagtgactcagtgactttgcatccctaaattgcctctcataaaaagtacattttctttgtacctcaggaagtatgggctctttatagaaactggaatgagggagtgggctagagtttatgccagagttggtggtattgatacaaaagttaaaatgtaacccctcctttaagggaacagtggccctaactacttacctataccatttagaggacagtgataaaaataatctcaaactcatttgtatggctttacaaatacatcacattattttaattggcccttaacagatctttctttccaataatattggctcagttaaatattgtcctcccctcttatttgcaggaaatatgtaccaagacacccaacagatgcttaaaacaatggatagtaatgaaccctatatatactatgttttttcctacagatacatacccatgataatgtttaatttataagttaggcacaatgagagattaacaataaccaacaaaaaagtggagcaattagaacaacatactgtaatgaaaataatgtgaatgtctgctctctctctcaaaatatcttattgtatttcactgtgggtaactgaaatcatggaaagtaaacccacagatgggggcaagcaggatagagttactgcactaaaactgtgattatttaaacaatcctggtgaaaaatttgacagatatctctggggtatgtgacaggtgtaaactgcttctcaactcaaaatgcaagatatgtcatatcttgtttttctaaataagctgctgctctaagatgccaagacacaaggcaagaaagcacatttaattccttctcttctcttgagctaccaggatccaacacaagccacagttcacaatgctacaaaacttagtagccaaccactgcaggtgtccccacagtcagtcccacattgtggtcacccacagggcattttgcctctaatgccagcagggtacaggacttcatgacctggaggaaagcctctcacaacccttcccttccccgtttccaggaagctacttccctacttcccagggtcaggctttcctcttctcctactttctttcccccacatccatcaacactttctcttccctaaaaatccagccgtcttcattcatggatctagccagaggtcacaatatgggagccttgggatagatccatccagcaggagtattttattaggattgaacggtgttattgatattttctaattgagtcaatttttaaaaaataggatatttttaatgaaaatctaaatgtgtatagtttctctaaaaaaatccaaagatctagaaacactgggtccatatcttgcatggcaatagttggctagaactgagtagagatcaacccctttagtttgagtctatccatagaagatctgttacagtaaaggagatttgactttatcctgtagacagtagggaatcattgaaaatgttgaactgaggaatgataaaatatttttactttacagagatcacattggtgaagtgtgatgatagtagtgtgatgataaagtgaggaggcaagagtagaaacagaaactggttagaggtctactgcattaatctaagggactaatgatgaaggtgtgacctaagacaacagaatagagaggacggactagatttcagatatattcagaaggtgaaatcaaaaagacttaatgacagattgaatgaattgtaagaatggaaagaaggaaaaataaatgattctcagctttttgatttaagaattgggtagacgccaggtgttgtggctcaagcctgtaatcccagaactttgggaggctgaggcgggcggatcatgaggtcaagagattgagatcatcctggttaacacggtgaaaccccgtctctactaaaaaatacaaaaaattgcctgggcatggtggcgggcgcctgtagtcccagccacttgggaggctgaggcaggagaatggcatgaactcgggaggcagagcttgcagtgagccgagatcacgccactgcactccagcctgggtgacagagcaagactctgtctccaaaaaaaaaaaaaaaaaaaaaaaaaaaaaaaaaagaattgggtggataatgatagatagttgtactatttctcaagataggcaattcaggagaaatatattgggggcagaaaaagataaagacattttttattataaggactgccatggtttgaatgtcccctccaaaactcatgttgaaatgtaattaccattgcgatagtattaagaggtggaaccggctgggtgcggtggcttatgcctgtaatcccagcactttgggaggccaaggtgggtggatcacgaggtcaagagattaagaccatctttgccaacatggtgaaaccccgtctctactaaaaatacaaaaattagctgggcaccgtggcgcacgcctgtagtcccagctactcaggaagctgaggcaggagaattgctggaacccaggaggcagaggttgcagtgagccaagattgcaccactgcactccagcctgacaacagagcgagtctccatctcaaaaaaataaaaataaaaaaaaagagaggtgggacctttaaggggtgattaggtaataaaggctctgccctcattaatggattaatgccattgtcatgggagtgggttagttattacaggattgggtttctgataaaaatgatgaagttcagtccccatcctttctttgcctcatgtgcactctcaccatgtgtgatgtcttccaccatgtgatgacacagcaagaaggccctcatcagctacagcccctcaatcttggacttctcaacctccagaaccagacaccaaataaaactcttttctttataaatcacccagtccatggtattttgttatggcagcagaaaagagactaagaccagtgtactttagtttaaggtagctgcaggtcacccaggtagagatatccagaattcagaagatatacacagaaagagacagctatgcttcaaagtagctgggtcaaaatgacttggggagaaagaaaaacagatagaaagctcaggaaaaagaccaaagatagagttacagtttggggagtcatcagcctctaaaaaggtgattgaagtcattggagcaagcatgattgcccaggaagaaagtttaagagtgagagaagaaaaaaagtcaaaaccctgaggaaaaccaacatttatgagcagacagtagagggataactaacaaagagacaaggtgcagtagtcagagagaaacaagaagaacctagggaaactggtgacatggcataaggaaagaggggttcaaagaaagaagtggtcctgagagtccaatgccacagacaggtcaagggtagtaagcagttaagaagacaccttggtaaaatccgtgcttggggaagaaacgaaagacggagtgattcacctctgtggtttcctatcagccatagtctagttctctgagtggcagaattatagaaagatttccagggcccttcctatttactcacaagaaatccctgagggattcatgctgctgttatgattaaattagctatgggaattttcttaaaattcatactaagccattgccctcagcgagcaggcaggatagagacatggaaagtggtaacagcccttatatacatttgagctggctctttgaccccagtggagtgctctctcctgcaaagtccacatgtccaggccagctttgcactttcctctccagaacacaaccctcacactttcagcttcccaaaacaccaaagcatatgttcttcaaaattctcctgatgcaaagtgttttcaatacttcaaatgtagtaacccccatccttgaactataaccagtgcttgtcctactagatgctagcccccacatgtacatctttaactttcttatctcctaaagacttccacatcttcagtacttcctcagtattgtgaccctcacttttaactacccaagactgatatcctgttccccccagagtccacactcagtattaggcatgcctatcacgttcccatgtgatgctgactaaaatataaagaatataaggagtgagtgttctttcagttatcatattatgccttttagctctgaaaagacaatgtgatatagttgctatggtttgaatgtttccaccaaaactcatgctaaaatttaatcaccattgtaacagtgttgagaggtcagatctttttttcttttcttttctttttttttttttttttttttttgagacagagtctcgctctgtcgccagactggagtgcagtggcactatctcagctcactgcaacctccggagaggtcggatctttaagatgtaattaggtcatgagaactccaccatcataaacagattactgctgttatcatgggagtggtttggttatcaagagactgggtttgttataaaagtgagttctccggatttcctctctgacttactcactgctgccttccaccatcagatgatcctcaccagatgccagcataatattcttggatttgcctgcctctagaagtgtaagaaataaatttctatcttttttttctttttttagagacagggtcgcactctgtcacccaggctggagtgcagtggcatgattatagctcactacagcctcaaactcccaggctcaagcaatcctttggtctcagcctcccaagttgctgagactacaggagcaggccaccatgcccagctactttttttttttaaattttttgtagagacggtcttactgtgttgcccaggctggtcttgaatgtctagcctcaagcaattttcttgcctcagcctcccaaagtgctgggattacaggtgtgagccacagcacctggccaacaaatttctttgctttataaattaccaagtctatggtattctgtgatagtagcagaaaatgaattaatacaacagtcagtaaagtattgtattaaattacttgtcaggagaataagtacaatgctggctctggcactagttttctttatgaattatctttgtaagtgtaaaagcactaaaatataaatacaagataccaccgttgatatttctgcattaagaatcaatggtagagagttctagagtgggtgtgaatataattaagtggtctccccttattaaatcagttgaagatagttaaaggtacctactcatctgaattggaagcaagatgtggattaattcaaaataatagctaataaaagcttttccacttatctttaaaaagcattattttaggaaggcaaatccactggagaatttttttaactcataaaatgaatcccagagtcacaaataatattttattttctgaattactgtgactaattgaaatttgacttcattgtataaattgcttgataattcatttactacataatgttaaaaattgagatcctatgactcatgtgttacaattttcttttctacctgattctgaaagactttttatgattttccaagtagcaaatttaattttctttttgagacttagatttttctttagcaaaatgaaataattactgaataattaacttttttactttgactgatttaatttgaatttgcattttgttagtccctcaaattgtagtgtagcattttcttagatggcggtaagtggatggtggtggaaagaataggtttgattttaggcacacttcagtcacaacttctcgccagctctgtaatcttgggcaagtgtcatgactcctgagagcctcagattatcatctgtaaaatggggacaataatgcccatcttgcaagattattatgaagaattaaatggagacatatgtaaaatcattagcacagcgtttggcccactgtagacacttagcaaatggtagttattttaatatcagtaacctttgtagacttcagcaatccctccaaaattattaaaagtgttctagacaaggagaaaagattgcacatttcatatgagtaaaagatacccctcaattaggcaaaggttgatatatgttggatacaggttcacactccctcatatggaattctgaaaaccaaaatttttttctaaagacctaaagtttttcagaacttatttgacagcaaaatatgacctaaactcatttcttgttcacatcaactaactcctgatgtgaactaacataaggtctttatttcactttgtgtaaattttcctatgtttcaatataaaattaactaattttgattatggggtgctgcccccatctcttctggggtgctacatatgtgcactatatgctctatattacaatcctaaaatctaaaaaactccgaattttgaaacacagctgagttaaggatttctgataagatactgtgaacctgtacttgctttcttggtctgctacactcaggatttgtagaaggataaagatgaatggaatgaaacagtctcacaagtttttcaattgtttagaatcccaacagaaggccaaagaagtttgccccatgtactttatgaagctccgctctggccttatgataaaaaaggaggcctgttactttaggagagaaaccaccaaaaggccttcactgaaaacaggtaaggggaaccgtacattctctggcaatagtgataagtatctgtttgccttcacttaccacatctaaatatgcaattatttttcctcactccaaggttccttttggaaaatattaagaatgatgaactggtttttagctatttttaaaagggcatataaagaattttcaatagcatgagagaaatgattatgttataatgttaagtgaaaacaaaagatacataactatgtgtaaatatgtttacaatatttttaagtgtttttttaatttaaaggaaataggtttaagcattaatagtgcttgccttttgggtgttgagactgtgggtgactagttttcttcctcctgatctctaatgagtgtgcttctactggggaataagtgtgccaagaggtatcaatccctttggaccatgaagtggccaaagccctggagtcaatcactactctcagcaagcagccttaactgggaatcctcaaaggggcatttgtgcagagtggggattgatggtctatccctaatcccatccggtctgcaggtagaaagcacaaaagacatctggtactcgctgcctgtcaacagcagtctactgtggagtgctttgcctttggtatatcaggggtccagaaatatactagagcacttcatgattcaagtatcacaggtatgactggttacaggggtgatgtgggagtgaggagggaggtatgacacaggaccccggaaagtgctactccaggtagcagtcccaagtctgtgtctttaatgtgtaccagaaacttctgcccatttgcagctgatgtacccatctaatagtatccaaagtaggtgcaaggtagctgttctaataatgtacatgcattctctagttagcactccatcattattttgaaatacttgcaatggattggaatcccatggtcattagttttggtgaaaatatgttatcttttgggaaaaaaacacattttccccccaaatttcaatattttgaccatgaaagaaaagagctattatatttttaaatataattctaacactttatacattttaagtagtagttaagatggttttaaattttatcacttccttgtataaggttccaagttgatgatgacttcaagaagtgaagagatcatcattaaaaaaaaaacttggccaggtgtggtggctcacacctgtaatcccagcactttgggaggccgaggttgatggatcacctgaggtcaggagttcaacaccagcctggccaacatggcgaaaccctgtctctactaaaaatacaaaaatctgttggttgtggtgatgtgcacccgtaattccagctacttgtgaggctgaggcacaagaattgcttgaaccttgacagaggttgcagtgagccgagatcatgtcagggcactctcgcctgggcaacaagagcggctgtctcagaaaaaaaacaaacaaacaaacaaaaaaaaacccaacaaaaaacaaaacaaaacaaaaaaaccaactttacctggaaattgcatttgccatttcaagcattattcctgctataaatgtcctaaattcccagaagcaacactgaagttttctcattaagtatttctaaatcatttactttagaagttcatgtacaaattcagtatgtaacattctccttaatattttgtatactatttttttccaggccccatctgagtagtccctaaatctgctccagtttacctcagcaggctataaaaatattatcattttctatgggtattttgacactttttaaaagttgggagcactgcactaagtgtccctgttatttagccagaggagagaacagggcttatatccgcattctccaggactgtcagaaacttctgggtaactccatactttatagatgaacatttatttatccatgtctatcaaaatacagtcccttctttaccacagtccccagaccaagtggtgtcatgaagtgaaggtttcctcaagcaatgtctgttgctttccattttctttttccccaccaaaccctcccataagcacactcacatggcctcccagggccttcatgcaggacactagcacctttaatcccattcaagggtcacatctcagccttttagctatgtaaaacttgtatcaaaggctttaatctagccaacagtgacatacaaaatgcaactcaaattgcaaaaatgttttttgagggagcattttttaaaaaggttgccaaaagaattgtgcctgacaaatttttgaattcttaacaacaggaatttcacctattacagagtatcttgcttctctaagcacatacaatgatcaatccattacttttgctttggaggatgaaagttatgagatatatgttgaagacttgaaaaaagatgaaaagaaaggtagattattttctttttctataataatgtaataatgactaataaaagtaaaacattttaataaatctaccaaactttaaacaatggattaacttagacatggcaaacaggtcatgctgtgtgctaactctaatgcattggcagtgggtgcctgaatccacttctatgtcaagatggattcagaagctttgtcacgttcatcagagaagaatgctgacattgaaatgcagtatctgttgtgaaagatggaaagaggggccacatgtatttgctatctctaaattatccaccagatctttctagccctattagtatcaccaaagtacaacctttatgccactgctatgaaaaatattttaaatattttaataacaactatattggagaattcatcagagcatattcgtgcatttttgagacctttctcaaaaccacaaaagatttgtttttattgatatataataaaaggggaggatattttctgatgttatgtgtgtgttggaactgaaaacttaacaaaattgtgtctcaccagagggattttatgcattctctttcagataaggtgttactgagttactatgagtctcaacacccctcaaatgaatcaggtaatttggagggctgggtagctgtagtgcttgaattcttaagtatggggtaaagataaatccaaaaaaatcctttttgccccataggaaaaaagatagtctcagaaggttatctccaacccaagctcatggtaaaaccttagattctcagaggatgcattctcatccattttacagcttaatcgttaggataaagttttggctacacttaatacagatccaaaacaagagtggtttatgctagataaaactttctgtcttagccagggctgcaatggctcaacaagttgtccagggaacccatctccttctatcttgtggttctgccaacatctacatggttcaagagtacttgggagcatgacaatgcctggtcagcaggacacagaaaaacagatgtatgcattctatttccctttaagggtacaacctagaagttgcacctaacacttcctcttatctcacattggtcagaactcagttgtattactacacttagccataagaaggcaagctggggaatgttctattactatcccaaaagaggaatgaatattgggtgacactatgagtggctttacatgcagacaggaaagctgatgccccgagaagtaaccattagggtcacaactctccaattaaaaagcatataagaaaactaatttctctccggtttataagtaccctctacttatcagtgcctcttgaacttgggtacaaatacttctaagatacctgttagtgaatgaagtaattattttatgtaacatcttagacttttttcctgggtgttgaattcatttaaataaagatgagttacagttcttaactttatcatttatactttcttaattgtaaggtgacggtgttgatggtaagatgttaatggtaaccctgagtcctacaaaagacttctggttgcatgccaacaacaaggaacactctgtggaggtaaaaaaaaaaaatttatctatatctatatatatgattacagaactgtcatgaatgactccaccaacttgtgtagatttgggtgttggggtattttgcagaaggatttttttgtgtgctattgtatataaagcacaatcacttactacaaatgacttgcttctagagtaaggaagggaggaaagtggcatgtatggctttgctattgaaagtctgctctctgccagcagcagagcatcacctgggagcctgttagaaatgcaggattctaagccccccagaaataaatcagaatcagcatattttaataaatctccaggaaattcatatgtgccttaaagtttgagaagcactgttacatagaatgatctcaaatcctttctgtttggctttaggaactactatgttcctctaggaaacgtttctttgtataatatcattttcttaaacaaatacaaaaaaaatttccattctgagcctgcttaagggagagtcataagcgtttccatgtgccaagatttataaataacctaacatctacattctgaacatagaattaattgcatattcttctttagttagcaaatggcattattacattggtcatgatgtgtaattataactattttgacaaacaagccaaaggtagaggcatggaagaaaacagaagagagcataatatagaagataaattatacaaacacagaaaaatataaagctaactaacacagccatgtaaggccttattaacataaatagtggatagtaaccagcatcttcctaagcaaaacattcctaaacatatataatctagtgtttggcatgtataactactcaataatagagctacttagactgagctctattatatagcaagcactgggctaaatgttttacaaatattattttatttaatactcacagtaactctacaatggagttgttgtattggtcaactgttgctatgtaacaaaccatcccaaaacttagtgcctcaaaataataatcatttatatttactcatgtctgtagatattttgaggattgactgatctagaaaactggttagactaaaaaaaatgaggcttgagagataaagcaacatccccaagatctcagagatagtacatgtcaaaagaagggtacaaatccagaactgttgcatccagatccaatcaccctaatccatactgcctctctatgttgactatcagtgaatcaaatcaaatccacccactacccctctggccctctactcacttctccccctcttccctccacaactcactaagcaagcttgctagaaatatcaagtcataaataagtattcccctttagtttccaatacaggcaggtaaagttgactctgaacttcccattcacatatggattgctttctctcttgtttcctcagctccataagtgtgaaaaaccactgccagaccaggccttctttgtccttcataatatgcactccaactgtgtttcatttgaatgcaagactgatcctggagtgtttataggtgtaaaggataatcatcttgctctgattaaagtagactcttctgagaatttgtgtactgaaaatatcttgtttaagctctctgaaacttagttgatggaaacctgtgagtcttgggttgagtacccaaatgctaccactggagaaggaatgagagataaagaaagagacaggtgacatctaagggaaatgaagagtgcttagcatgtgtggaatgttttccatattatgtataaaaatattttttctaatcctccagttattcttttatttccctctgtataactgcatcttcaatacaagtatcagtatattaaatagggtattggtaaagaaacggtcaacattctaaagagatacagtctgacctttacttttctctagtttcagtccagaaagaacttcatatttagagctaaggccactgaggaaagagccatagcttaagtctctatgtagacagggatccattttaaagagctacttagagaaataattttccacagttccaaacgataggctcaaacactagagctgctagtaaaaagaagaccagatgcttcacagaattatcattttttcaactggaataaaacaccaggtttgtttgtagatgtcttaggcaacactcagagcagatctcccttactgtcaggggatatggaacttcaaaggcccacatggcaagccaggtaacataaatgtgtgaaaaagtaaagataactaaaaaatttagaaaaataaatccagtatttgtaaagtgaataacttcatttctaattgtttaatttttaaaattctgatttttatatattgagtttaagcaaggcattcttacacgaggaagtgaagtaaattttagttcagacataaaatttcacttattaggaatatgtaacatgctaaaacttttttttttttaaagagtactgagtcacaacatgttttagagcatccaagtaccatataatccaactatcatggtaaggccagaaatcttctaacctaccagagcctagatgagacaccgaattaacattaaaatttcagtaactgactgtccctcatgtccatggcctaccatcccttctgaccctggcttccagggacctatgtcttttaatactcactgtcacattgggcaaagttgcttctaatccttatttcccatgtgcacaagtctttttgtattccagcttcctgataacactgcttactgtggaatattcatttgacatctgtctcttttcatttcttttaactaccatgcccttgatatatcttttgcacctgctgaacttcatttctgtatcacctgacctctggatgccaaaacgtttattctgctttgtctgttgtagaattttagataaagctattaatggcaatatttttttgctaaacgtttttgttttttactgtcactagggcaataaaatttatactcaaccatataataacattttttaactactaaaggagtagtttttattttaaagtcttagcaatttctattacaacttttcttagacttaacacttatgataaatgactaacatagtaacagaatctttatgaaatatgaccttttctgaaaatacatacttttacatttctactttattgagacctattagatgtaagtgctagtagaatataagataaaagaggctgagaattaccatacaagggtattacaactgtaaaacaatttatctttgtttcattgttctgtcaataattgttaccaaagagataaaaataaaagcagaatgtatatcatcccatctgaaaaacactaattattgacatgtgcatctgtacaataaacttaaaatgattattaaataatcaaatatatctactacattgtttatattattgaataaagtatattttccaaatgtatgtgagactataatgattttatcatatgatgactcaatattctgaaatttctttttttattatactttaagttctagggtccatgtgcacgacatgcaggtttgttacatatgtatacatgtgccatgttggtatgctgcacccattaactcatcatttacattgggtatatctcctaatgctatccctcccccttcccccaccccacaacaggccctggtgtgcggtgttccccactctgtgtccaagtgttttcattgttcaattcccacctataagtgagaacatgcagtgtttggtttttagtccgtgcgatagtttgttcagaatgatggtttccagctccatccatgtccctacaaaggacatgaactcatcctttttatggctgcatagtattccatggtgtatatgtgccacattttcttaatccactctatcactgatggacatttgggttggttccaagtctttgctattgtgaatagtgccgcaataaacatacgtgtgcatatgtctttatagcagcatgatttataatcctttgggtatatacccagtaatgggatggctgggtcaaatggtatttctagttctagatccttgaagaatcaccacactgtcttccacaatggctgaactagcttacagtcccaccaacagtgtaaaagtgttcctatttctccacatcctctccagcacctgtttcctgactttttaatgttcaccattctacccggtgtgagatggtatctcattgtggttttgatttgaatttatctaatggccagagatgatgagcattttttcatgtgtctgttggctgcataaatgtcttcttttgaaaagtgtctgttcatatactttgcccactttttgatggggttgtttgagtttttcttctaaatttgtttaaattctttgtagattctggatattagccctttgtcagatgggtagattgcaaaaattttctcccattctgtaggttgcctgttcactctgatggtagtttcttttgctgtgcagaagctctttggtttcattagatcccatttgtctattttggcttttgttgccattgcttttggtgttttagacatgaagaccttgcccatgcctatgtcctgaatggtattgcctagggtttcttctagggtttttatggttttaggtctgatatttaagtctttaatccatcttgaattaatttttgtataaggcgtaaggaagggatccagtttcagctttctacatatggctagccagtttccccagcaccatttattaaataggcaatctttccccatttcttgtttttgtcaggtttgtcaaagatcagatggatgtagatgtgtggtattatttctgagggctctgttctgttccattggtctatatgtctgttttggtaccagtaccatgctgttttggttactgtagtatagtttgaagtcaggtagcgtgatgcctccagctttgttcttttggcttaggactgtcttggcaatgcgggctcttttttggttccatatgaactttaaagtagttttttccaattctgtgaagaaagtcattggtagcttgatgggatggcgttgaatctgtaaattaccttgggcagtatggccattttcatgatattgattcttcctatccatgaacatggaatgttcttccatttgtttgtgtcctcttttatttcattgagcagtggtttgtagttctccttgaagaggttcttcacatcccttgtaagttggattcctaggtattttattctctttgaagcaattgtgaatgggagttcactcatgatttggctctctgtttgtgtgttgttggtgtataagaatgcttgtgatttttgcacattgattttgtatcctgagactttgctgaagttgcttatcagcttaaggagattttgggctgagatgatggggttttctaaatatacaatcatgtcatctacaaacagggacagtttgacgtcctcttttcctaattgaataccctttatttctttctcctgcctgattgccctggccagaacttccaacactatgttgaataggagtggtgagagagggcatccctgtcttgtgccagttttcaaagggaatgcttccagtttttgcccattcagtatgatattggctgtgggtttatcatagatagctcttattattttgagatacgtcccatcaatacctaatttattgagagtttttagtatgaagggatgttgaattttgtcaaaggtcttttctgcatctattgagataatcgtgtggtttttgtctttggttctgtttatatgatggattaaatttatggatttgcacatgttgaaccatccttgcatcccagggatgaagcccacttggtcatggaggataagctttttgatgtgctgctggattcagtttgccagtattttattgaggatttttatatcgatattcatcaaggatattcgtctaaaattctctttttttgttgtgtctctgcccagctttgttatcaggatgaagctggcctcataaaatgagttagggaggattccctctttttctattgattggaatagtttcagaaggaatgttaccagctcctctttgtacctctggtagaattcagctatgaatccgtctggtcctggacttttttttggttggtaggctattaattattgcttcaatttcagagcctgttattggtctgttcagggattcaacttcttcctggtttagtcttgggagggtgtatgtgtccaggaatttatccatttcgtctagattttctagtttatttgcatagaggtgtttacagtattttctgatggtagtttgtatttctgtgggatcagtggtgatatctcctttatcattttttattgcgtctatttgatttttctctttttctttattagtcttgctagaggtctatcaattttgttgatcctttcaaaacaccagctcctggattcattgatttttttgaaggtttttttgcgtctttatttccttcagttctgctctgatcttagctatttcttgccttctgctagcttttgaatgtgttagctcttgcttttctagttcttttaattgtgatgttatggtgtcagttttagatctttcctgctttctcttgtgggcatttaatgctataaatttccctatacacactgctttaaatgtgtcccagagattctggtatgttgtgtctttgttctcattggtttcaaagaacatctttatttctgccttcattttgttatgtacccagtagtcatttaggagcagggtgttcagtgtccatgtagttgagtggttttgagtgagtttcttaatcctgagttctagtttgattgcactgtggtctgagagacagtttgttataatttctcttcttttacatttgctgaagggtgctttacttccaactatgtggtcaattttggaataagtgcaatgtggtgctgaaaagaatgcataatctgttgatttggggagttctgtagatgtctattaggtccacttggtgcagagctgagttcaattcctggatatccttgttaactttctgtctcgttgatctgtctaatgttgacagtggggtgttaaagtctcccattattactgtgtgggagtctaagtctctttgtaggtctcttaggacttgctttatgaatctgggtgctcccatattgggtgcatatatatttaggatagttagctcttcttgttgaattgatccctttaccattatgtaatggccttctttgtctcttctgatctttgttggtttaaagtatggtttaccagagactaggattgcaacccccgctttttttttgttttccatttgcttggtagatcttccaccatccctttattttgagcctatgtgtgtctctgcatgtgagatgggtctcctgaatacagcacactgatgggtcttgactctttatccaatttgccagtctgtgtcttttaattggagcatttagcccatttacatttaaggttaatattgttatgtgtgaatcttatcctgtcattatgatgttagctggttattttgctcgttagttgatgcagtttcttcctagcatcaatggtctttataatttggcatgtttttgcaatggctggtaccagttgttcctttccctgtttagtgcttcctcaggaactcttgtaaggcaaggcttgtggtgacaaaatctctcagcatttgcttgtctgtaaaggattttatttctccttcacttatgaagcttagtttggcaggatatgaaattctgggttgaaaattcttttctttaagaatgttgaggccgggcgcggtggctcacgcctgtaatcccagcactttgggaggccgaggcaggcggatcacgaggtcaggagatcgagaccacggtgaaaccccgtctctactaaaaatacaaaaaaattagccacgcgcagtggcgggtgcctgtagtcccagctactcgggaggctgaggcaggagaatgatgtgaacccggaaggcggagcttgcagtgagcggagatcgcgccacagcacttccgcctgggcgacagaacgagactccgtctcaaaaaaaaaaaaaaaaagaatgttgaatataggcccccactcttttctggcttgtagagtttctgccgagagatccgctgttagtcttatgggcttccctttgggggtaacctgacctttctctctggccgcccttaacattttttccttcatttcaactttggtgaatctgacaattatgtgtcttggagttgctcttcttgaggagtatctttgtggtgttctctgtattttgtgaatttgaatgttggcctcccttgctaggttgaggatgttctcctggataatatcctgcagagtgttttccaacttggttccattctccccatcactttcaggtacacgaatcagacgtagatttggtcttttcacatagtcccatatttcttggaggctttatttgtttctttttactcttttttctctaaacttctcttcttgcttcatttcattcatttggtcttcaatcactgataccctttcttccagttgatcaaatcggctactgaagcttgtgcatgtgtcacatagttctcgtgccatggttttcagctccaccaggtcatttaaggtgttctctatgctgtttattctagttagccattcatctaatcttttttcaaggtttttagcttctttgcgatgggttcgaacatcctcctttagctcagagaagtttgttattaccgatcttctgaagccttcttctctcaactcgtcaaagtcattctctatccagctttgttccattcctggcaaggagctgcgttcctttggaagagaagaggcactctgatttttagaattttcagcttttctgctctggtttctccccatctttgtggttttatctacctttggtctttgatgatggtgacgtacagatagggttttggtgtggatgtcctttctgtttgttagttttcctcctaacagtcaggaccctcagctgcaggtctcttggagtttgctggaggtccactccagaccctgtttgcctggttatcaccagtggaggctgcagaaccacaaatgttgcagaatggcaaattttgctgcctaatcattcctctggaagctttgtctcagaggggcacctggatgtatgaggtgtcagtcagcccctactgggaggtgcctcccagttaggctactcaggggtcagggacccacttgaggaggcagtctgtcagttctcagatctcagacttggtggtgtgagaaccactactctcttcaaagctgtcagacaggaatgtttaagtctgcagaagtttctgctgccttttcttcagctatgcccttcccccagaggtggagtctacagaggcaggcaggcctccttgagctgcggtgggctccacccagttagagctacttggccactttgtttacctactcaagcctcagcaatggcgggcgcccctcccccagcctcactgccatcttgcagtttgatctcagactgctgtgctagcagtgagcaaggctccgtgggcatgggaccctctgagcaaggcacaggatataatctcctggtgtgccatttgctaagaccattggaaaagtgcagtattaggatgagagtgacccgattttccaggtgccgtctgttatggcttcccttagctaggaaagggaattccccagccgcttgtgcttcctgggtgaggcgatgcctcaccctgcttcagttcacaatccatgggctgcacccactgtcctgcacctactgtccaactagccccagtgatatgaacccagtacctcaggtggaagtgcagaaatcaccgtcttctatgtcgctcacactgggagctgtagacttgagctgttcctattcagccatcttggaaccaagaccccgatattctgaaattcttaagtgaaagtaagcatattccaatctaccaatgttggtatccggagtaggtcattacctgataattttggttattcaaaactaagtaatattttcaagagaagagattgtgtctttttcacctttgtactgtcagtgcccatactggtgggtggcaagaaggtgttcaatgacttttactcagaatcaaacatctaacaggtacctgcaccagaaccttgatctgatcattctgactccttaggtagataactttcaactcagctcacttattttctgtgtttaagtttcctttttttaaaaaaaaaatttccaccatcattatagtcagtataatttgattaaaatattcaaatatgaggtggcatttttgtcacttacctgtatgtgttttcatggtccaaatacacattactggaaagaatttgttcatttcattgtatcaggaaggataattgtgtcaaaacttactttttcctcattttatttgtcttctttaggtttttatgtatttactgactatcttgaaatactgtcaagaaaattttatttgaacgagtaaaatgacttagaatcgggaagaaataagtaagagttgagattcagggggaatttggaaagaaaattgccaacctaatttgaaaacagcagcttgatttaaaactaaaacaatttattcataatccccacttctgcagaacaaaataagccaaaaaataatttcaatccttgtgcctcacactgaaaaatttcatgatggatagaaatcttcagctgcaatcccattactgggtatatacccagaggaataggaatacaaatctttctaccataaatatacatgcacacaaatgttcattgcagcactattcacaatagcaaagacacggaatcaacctaaatgtccatcagtgacagactagataaagaaagtgtggtacatatacacactagaatactatgcagtcatgaaaaagaatgagatcatgtcttttgtgggaatatggatggagctggaggtcattatgaatttataaatacaagtagactggggtctacttgagggtggagggtgggaggagggagatgaacagaaaagttaactattgggtactgggcttaattcctgggtgatgaaataatctgtacaacaaactcccatgacatgagtttacctatgtaacaaaccttcacttgtaccctctaacctataacaaaagtttaaaaaaaataattttaaaaacagaaatcttcagctgtggtatgccagtgggtggttggagtagtaggcttgtcccaaaactccttctcccttcaagtataagcctatacagccctgaaatctcatcttctagcagttatacatcaaataggtgccatatgtactgtgactttgctaggcaccatgacagcacaaaagaaacttaagccatgctccttgttcacatggaaattaaaacatgtaccatatgtattattattattttttttaaacagagtctcactctgtcacccaagctggagtgcagtggcatgatctcagctcacggcaacctctgcctcctaggttcaagcaattctcctgcctcagcctccctggtagttgagactacaggtgcctgccagcacgcccagctaatttttgtatttttttagtagagacagggtttcaccatattggccaggtgggtctcgaactccggaccttggtatctgcctacctcggcctcccaaagttctgggattacaggcgtgagccaccattcccagccccctaaaacgtgtaccatatgtattataactccaactctgcagtacagttgtacaaaggtgagaaagatcagtgtggatttgtcatcagggaaagaaatataactgaattgtctatccccataccctaacacccatccctatctattcttatatccattctcaaggtcttgttaagcaggttcctcatgtaggtcttaggtaaaaggggtaaattcagttgttttaacccctttagtggtcaggattatatatggggacttaggaatctgaggaaataaatcaagagatgaaagtgattgtgagttggtagagggaggatcgatgaattatttcctgctgaagtgccaagatgactgtgatggttaatattaggtgtcaacttgactgaattgagggatgcctacatggctggtaaagtattatttctgggtgtgtctgtgaaggtgttgccaaaggagagtgacatttttgtttgtttgtttgtttttgagacagggtctcactctgtcacctaggctggagtgcagtggagcaatctcagctcactgcaacctcagcctcccaggctcaagtgatcctcccacctcagcctcctggggagctgggactacaggcacgtgctaccacatccacctaatatttgcatttttttgtagagccagggtttcactatgttgtccaggctgctctcaaactcccgggctcaagcgattcgcctacctcagcctcccaaagtgctgggattataggctgagccaccgcatcctgccaagattgacttttgagtcagtggactgaaaaaggaagaaccaccctcaatgtgggtaggcaccattcaatcagccaccagcacaactagaacaaagcaggtggaagaagggtgataaacttactaacttagtcttctcactctcttcccttgccgggcacttgcttcctttcctcctatcctcggacatcagactctaggttcttcagctttggactctgagatttgcactagtggcctcccaggggctcttgggccttcagcctcagactgaaggccacactttcagcctccctggaattgaggctttctatcttggactaaaccgctctaccagcttctctttttccccaacttgtagatggcctattttgggacttcaccttttaatcgtgtgagccaattatccttaataaactcagatagatagatagatagatagatagatagatagatagatagatagatagagtgtatatatacattgtgtgtgtgtgtatatatatatagatatatatatatctatatatatatatctatatagctatatatatatatatctatatagctatatatatatatatatatctatatctatctatctcctactggttctgtccctctggagaaccctgactaatacaaagatgaaatacttgtccaagtttaattacagtccctagcacagaggatgcgcccacaaagagatcacgtgaatcagtgtccaatgtattaagagcagggttggtttgctgcttataggctgtgcaactttggtaaggtaagtaacctctctcaatatctatttctcctctgtaaatagggagtaccaaatattgtaattgtctacctaatatccacaaccaccatccctactgctttaccaatagaccctcatttttttttttttaccagacaacagtgcacacaactaaaaatacactctttcccagattccca

SEQ ID NO: 502 - DNA, 40536 bp, Homo sapiens
aattagtttggtgagcttggacatgacaactctaatctacactcccctaattcacagtgcttttgactttatcatgtatatatatacacacacacacacacgtgtatttatatatggtatacatatttataatatatatttgcatatggtatatatttatatatggtgtgtgtgtgtatatatgtgtgtgtgtgtgtgtatatatatatatatgtgtatatatatatatctttgagacaggctcttgctctgtcacccttcagccttaactccctggctcaaagtgatcctcccacctcagcctcctgagtagctagaactacaaaagtgtaccaccaccacacctggcaaattaaaagaaatttttttttgtagagatgaggtctcactatgttgcccaggctgacttttgatccccatcaaatacttttgaccttactgattcccatcaaacacttagcagtgtttgtttgtttgtctgttttaactgaggtatgacacagtaatatgcgctaatctaagtgtacaccatgataaatttttgcattcgtatatcagcatgtaacccaccaggcagattaagttatagaatacattagcagtgacagactaacctagtggttttactactaccaagtttagaatgagtaagcagcccactgtagtatgacctgatacataaaatgcgagaaagatgcagagttctaccacagttttgagttagaagtcagaataatagatttgctatactatcttttcatgtgctttctggagccatgtatatagaaacaccatgacaaaatagattttaatgttaattaaacatgctttattatatgcaaattaaaaaaatattaagtcccctgtgttagcatactttattactcacctccccgccccccatcagaatcagtgtcagggttcgatatgttgtcctcctctcttgggtgctgaccacagtcactttgggctttttgtttgtctatttgctctaagatggagtctcactctgtcacccaggctggagggcaatggcgccatcttggctcactgcaacctctgcctcccgggttcaagcgattctcctgcctcagccccctgagcagctgggattacaggcgtgcaccaccacgcctgtgtcatttttgtatttttagtggagacagggtttcgccatgttggccagactggtctcgaactcttgacctcaagtgattctcccacctcggcctcccagagtgctgagattataggcatgagtcactggcacccagcctgaccacagttactttggatgcagaagcaaccaatcccaaaaagcagccaagtccatgagagactatggctacaaatcactttttttacagattgtctcatgcttcttatttctgacctgctttaatactatgtaagaaaagcaggtatttggtagtttaaatcatgtgtgtgcataatatattgaccacatctgaagtgaataggtacatctggaaatctaaggtttttgttttctctacatttaacgaacataagtgcacaccacacaccaagatccctgccttgtttcaacattacaaaatggcacacagaatcgtgctaggggttgagccttgtttgcctttgttggagccaacaaactgggcattgtctttgcacagccagtcagagctgtaaatagttgtcaagaatgtgtaaccagacatataattaccaagagtgccctttttcagaccccatttcaactaagtgcattcccctcatttctcatatttgccaggcttgtcggtttctcaagattgcaagcccaaaggcttgagaccctctatatcttagacagcatctattgtgtggttggaattcagcaaatgttgaaaaatagagataattactcataaagcaagttcaagcgttccttgatataatgcccagtatttatttccacttgttgagggggagaatctttgacacagggacttttttccttgaggaaagacagacagccttatgcaggagagtggaacagggtctgggcttctctgcataggctggtgtgacctcacttaaatctgaaatctctctcagcaaaataccagtggttgtaaagctgcatcattccagcgctgtgatcagaggaaacagtgggcaggaaaaccctttgttttcctaggaactgccttttcatcttctggctttcctactgctgtggttctccatgcttctcagggaccactgaacttacagccttgagtgggcaggcagtgcagagccctgatgttacatcctctgttccaggtcttctctgacagacctagggtctttcttggatcccacagaaagacagcaggtggctgcccatgaggtatgtcttgagaagtgaccatgttctacattccccatggtatctccctcgagagcctgtattagaacctgaagtcccctcacctttaaactgctcttcaggtcgggcgtggtggctcatgcctgtaatcctagcactttgggaggccatgtcaggcagatcacttgaggtcaggagttcaagaccagcctggccaacatggcaacacccgctctctactaaaaatacaaaaaaaaattagccgggcatgttggtgcgtgcctgtagtcccagctacttaggagactgaggcaggagaatcgcttgaaccagggaggtggaggttacagtgagctgagatcagccactgcattccagcctgggtgacagagtgagactctgtctcaaaaaaaaaaaaaaacaaaaaaacaaaaaaacaccaaaaactgaaaaaacaaaactcctcctcttataacttggcagagcctttttggagggagtttgacaaaatgttccaagaacctaacaaatattcatagcctttttgtttgtttttggttttttgttttgttttgcttcattgtgttttgagacagagtcttgctctgtcacccaggctggagtatagtggccaatctcggctcactgcaacctctgcctcccaggttcaagtgatcctcctgcctcagcctcccaagtagctgggactacaggcatgcaccaccatgcccagctactttttgtatttttaatggagacgggatttcaccatgttgaccaggctggtcttgaactcctgacctcaggtgatccatctgccttggcctcccaaagttctgagattacaggagtgagccaccacgcccagcctcctagtctctgaatctgccattccttgtcaataatttgcttagggaaattactagcatgtgtggtatttaaaatagtgactgatgagaaacaacctaactacccaaaaccacagaaatggtgaaataaattacattacagtcaatacggccattaaaaattaggttgtaacatggtatttaatgatgtgagaatgttagcaatatatgaagtcaaaagaagcgggttaccaaacagtacaattccgattacatttataaataattaaacctaacatgcttaggaaaaagaacaaagaaaatgtgttagatgttaatgattgttggtgaattttattttttactttatacttttctgtattttcttcaatgaatatgttatttttgaatatatatatattttaaataatgggtcttgctacattgtccaggctggcctcaaactcctgggctgaaaaatatgcctgcctcagccttctgaatagctgggattacaggcgtgagccctcatgcccagcaaatatgtgttatttttataatgagaaaaaacttcataaagttccccttttgcattctttgtgtcaaggaactggatcttccaaggcttggttaagatgcataagttggccaggtgtggtggttcatgcctgtaatcccagcactttgggaggccaaggcaggcagatcacttgaggccaggagtttgagaccagcctggctgaatggtgaaaccccgcctctacttaaaatacaaaaattagccaggtatggtggtacatgcccataatcccagctacttgggaggctgagacatgagaatcacttgaacccgggagatggaggttgcagtgagccaagatggtgccactgcactccagcctggacaacagagtgagactgtctaaaaaaaaaaaacaacaaaacgtaagttacctgaaacttagaggtcaaaaccatgagttgtccagattagtctggtttttaatcctagatttgctattttccaaaagtgcaatcatgggcaagttactcaatgtccttaagtcttggttttctcctccatgaaatagggatgatggaagtgtttgttacacagagcagtgggaggattaaatgaatagtgcaggaaaagtgctgtgtagagtggctggcacctgataaatggggactgctagtaatagtaatagtagtgctgggagagctaccacactctgctgccaactatccatgccacatcagcacgagtagtttaatttatgtgagttaatttctggccgccttcttgtaggacagacaagaggagttgggagtccaagaggctgaggtcccaggagactcagagctggtgggcacacactccccagctggttgggtcagccctgcccatgtcctgtgcaccgagtggggagaagtgatattcttatctcctagcaaaattcacacaaggaaaaactgccccactttaacttttctgtcgtgtaatgttcagaatagctaaataccagctgctgggagaacaacaaattctaatttcctggcttatatgtagtaaggtttcattgtattggcatagctttgccagtttaaggaatttaatttccttagctttttaaacacaaagcactccgaacaagaaaaatggaaataaaagggtataactgcacaatggaatacacataccaatttgaagatgtcattgacattctcataattactcattaaaataaaagcatgcaggccgggcacggtagctcacacctctaatcccagcactttggaaggctgaggcgggggaccacctgaggtcaggagttcgagaccggcctggccaagatggtgaaaccctgtttctattagaaatacaaaaattggctgggcatggtggcatgcgcctgtagtcccaactactcaggaggttgaggcaggaggatcgcttgaatccgggaggtggaggttgcagtgagccaagattgcaccgcttcactgcagcctgggtgacagagggagactctgtctaaaaaataagtaaataaataaataaagaaataataaataaatgcatataacaagagaaataaatatttttactttcaaaggcaagcagcagcaatataaccatatttagggaatataaactcatgcttgctttatccaagtcatgccatagttccttatttatatttttatgtcaagcaattctgtcaaatttagcaaaagacatgattattacaaaaaattaaataaacatccttagatctcaatataaaaaagaaaattatttctagcacggcagtagaaaaagtcaccaaaaaaaagttcaaagccagtaagacactattttaaaacattagctaattcaaaaatatccccaccaaactggatattactcgatgctgaaaaaatattccttttggcaaaatcaacttctatttctaccttagttttcttccttcttttttccctattagtctctgccctgtcatctgttatatgtatgtaaaaaggtctaagaaatttttttacaacctaatatttaaatattattattattatttagagacagggtctcactctgtcacccaggctggagtacagtggcaaaatcatagctcactgctgcttccaactcctgggtttagcctcctgggtagttgggactacaggtgcaggccaccatgcccagctatttttttttttttactttttgtagcaacagggtctcgctatggtgctcaggctggtcttgaactcctggcctcaagtgatcctcctgcctcagactcccaaagtactgggattacaagcatgagccaccctgactgggccaaagatattccttatagtgattcacaaattgtagttacttgttttgtttgtttgttttttgagagggagtctcactctgttgcccaggctggagtgcagtggcgtgatcttggcttactacaacctccacctcccaggttcacacaattctcctgcctcagcctcccgagtaactgggattataggtacccatcaccacgcccaactaatttttgtactttagtagagatggggttttgccatgttggccaggttggtctcgaactcctgacctcaggtgatcagcctgcctcagtggcctcccaaagtgctaggattacaggcatgagccaccgcacctagccttgtagttacttgtttaaaagtcaatctatttgaaaactatggtacagatgaaagtaacttgattgttagaagagagttttgtcagatttatcttgatagattaaaacagtgctatgaacttggtatgtgcctaattacaatagtccccccttattcacgctttcgctttcagtggtttcaggtacctgtggtcaactatggtctgaaaataagtgactactgcacaataacaattctgagagaaagggagagccatattcacataacttaatgaacatggtctctcccacattccggagcaagagagagtgagaataggggagaggtgccacacacttttaaaggaccagatcttgcaagaactcactcactatcgtgaagacagcaccaagccatgaggaatctgcccccatgacccaaacacagcatattattataatagttctatttttagttattgctgctaatctcttactgtgcctaatttatacactaaactttatcacaggtatgtatgtataggaaaaaacatagtatatttaggattcgctactatctttggtttcaggagtccccatgtgtcttagaacatatcccctggaaacaaagcgggagactactataaatacatgttagacaatgagaggggtggctagagagaaagtgaggggtcacagcaaaaactacccaaagcaccactttcctaaaccacccatgtgctaaagtatggaaatcatcacattagggtgagaaagaataagggtcttcaattgccgcatgaaacatcaaaatctgccaggtgcggtggctcacccctataatcccagcaccttaggaggctgaggtgggtggatcacgaggtcaggagtttgagaccagcctggccaacatggtgaaaccctgtctctactaaaaatacaaaaattagctgggcatggtggcatgcgcctgtagtcccaactactctggaggctgaggcaggagaatcgcttgaacccaggaggtggaggttgtagtgagctgagatcgcgccactgcatgccagcctgggcaacagagtgagactccgcctcaaaaaaaaaaaaagaaaaaaaagaaacatcaaaattgttaaaatcactgctatggtttgaattttgtctcccccatatccccaaaaagatatgtttaagtcctaacccccagaacctcataatgtgacctcatttggaaacagggtaattgcagatataattatggcggtacctgcggcgaatccctacaggtctgcagcaaccccaattattgcctcctcagaagaaagaatttgactgagcggcataaggcagaaggagagaccgaggcaagttttagagcaggagtgagtttattaaaaagctttagcgcaggaatgaaaggaagtaaagtacactccgaagagggccaagcgggcgacttgagagatcaagtttgtagtctgaccgttgacttggagtttttttgtttgttttctttttcagacggagtctcgctctgttgccaggctggagtgcagtggtgtaatctaggctcactgcaacctccgccgcccggattcaagcaatttccctgcctcagcctcccgagtagctgggactacaggcacgcgccacaacgcccggctaatttttttgtattttagtagagacaggatttcatcatgttggccaggatggtcccgatctctgacctggtgatctgccagtctcggcctcccaaagcgctgggattacaggcgtgagccactgcgcccgacttgacctggggttttatatgttggcatgccttgggggtctggggtggaggtggggttgcctcccttctttcctaattcttcccttggggtgggctgcccgcatgtgcagtggcccgctagcacttggtaggggagcatgcagtgtgtttactggagttgtacccatgcttgcctgaggtgtcctgcccttaccagtctagcattcctagaggaaggtcatgtaccagttaaactctaccattttgtctcttaatgtgcatgattaagcccactcgcccaactcctgagattttatgggaagctgctgatcaccagttttaggtgttttctgttttgggaggtggaccttccctggtgcctgctgtgaacaattattattttagagagacagttaacaaaaccgtctgaccatcacttgatggtcccctgacactcctggtgtgtgtacgtgcgtgtgcgcaggggtgggggtcaaggtggggaagtggggtggggtgggagttgggggagcccttttctgccttgctcatacctgtctggctacctactgtaacaacgggtcatactggagtagggtgggcccttaatccaatatgactggagttcttgtaagaagacagccatatgaagacacagacacacagggtgagcagcatgggatgacagaggcagagatgggagtgatgcagctgcaagctgaggaacagcacatgctggcaacccccagaagccaggaagaggcaaggaaggacccccttccaggctttagagggagcaggtcctgctgacctcttaatctcagactcccagcctccaggactgcaaggcaacacagttctgctgttttaagccatgcagtctgtggtactttgagtagccctaggaaattaatacaattactttatttcattttattttaaaagctatttaaggccgggtgcaggggcttatgcctataatcccagcactttgggaggctgaggtgggcggatcacctgaggtaaggagttcaagaccagcctggccaaaatggtgaaacccccatctctactgaaaaaaaaaaaaaaaaaaaaaaaaaaaaaaaaaattagccaggcctggtggtgcgtgcctgtaatcccagctactcgggaaggctgaggcaagaggatcacttgaaccagggaggcggaggttgcagtgggctgagattgcacctctgcactccagcctgggcaacagagtgagactccatcttgaagaaaaaaaaaaatacacattttgaaaggaaaaaaaacagttttgtcagtgaaaaactactaaaatttcatgtatttcttccattatctttcctctgaatagttttaaaattttacatggctatgaccataatctcatacaaattttgtagtgatattttcaatttatattgtaacattcattctctatgttattacaaacttttgtaaacatcctttaaatttttcaatgtagtcaatgttgcctagattattgtttggcagctttcttttagatttctatttttattattatagacagtctcttgtatctgactcttgaaggagttaaaaatgctttagattatcttatcagttccctaaaatgtgctctgagtgaaataggaggtaggctatttaattaaaaagcaggctaccaaatagaccctaatagactgagctcacacttaaataaactggaatggggtcacaactcactctcaggtctatgtgttagtatgagaaggaagtgtcagataattaatgcatacttagtcccaagataccaggttgggtgatgtaaccactataacggtagattctggtagaaccaaatccaaagcccaagttcctggattccctcccttgcatcatttcttttttctttttctttttttgagatggaatctcgctctgtcgcccaggctggagtgcagtggcgggatctcagctcactgcaagctccgtctcccgggttcacgacgttctcctgcctcagcctcctgagtagctgggactacaggtgcccgccaccatgctcagctaatttttttttttttttttgtatttttagtagagacagggtttcaccgtgttagtcaggatggtctcgatcctgacctcgtgatccgcctgcctcggcctcccaaagtgctgggattacaggcgtgagccaccacactcggcccctcccctgcatcatttctatttctttactcaggtcatgacaatgattacaaaaaatgtttaaagttgacatagtttggatatttgtcccggcccaaacctcatgttgaattgtaacccccaatgcaggaagtggggcctggtgggagttgtttggatcatgggggtggatccctcatggcttggtgctgtcttcgagacagtgagtgagtcattgtgagatctccttgtaaagtgtgttgcagggctaggcatggtggctcatgcctgtaatcctagtccgttgggaggctgaggcgggtggattgctgagctcagaagtctgagaccagcctgggcaacatggtgaacatggtgaaaccctgtctctaatttgaaaaaaaaaaaaaaaaaaaattagccgggtgtgatggcatgcacacctgtggtcccagctacttgggaggctgaggcaagagaatcgcttgaacccaggaagcagagactgcagtgagctgagatcgtgccactgcactccagcctgggtgagagtgagattctgtctccaaaatagtaataataaataacaataataataagataaacatgtgttgcacctctcccccactctctcttgctcctgcttttgccatgtgatgtgcctgcttctacttcgctttctgccatgaataaaagctccctgaggcctccccagaagcccagtgatgtcagcatcatgcttgtacagcctgcagaactgtcagccaattaaatctccttagaaattacccagtcttgggtatttctttgcagcaaacaagaacagcctaatacaaaagtgttgcttagttctgagctcatcaaacatatatttaatagatatctctgccatgtgattatgtaagtcttggtttcaagtacacttaactcagggttttaaaatttctcttagcagtggaaatctcatcttaaaaaatattatgaacatttctaatttataaaatctaaaaaagcagaacttgtgtggtggaagaagggagggccagacagtgagctcagcagtcctattactagctcctcagacctcccctggaatattcaggaggacctgatccatctctagggaaccttggggcactgaggaacacagtttgtacaacagaacacatattctatttttcatccactctacatagaatggcagggcagaaagggacattcttagaggtctgattctttctaaacaattaatagttctgaaaaatagctttgaaattttttctagataactggttctctcttctgagtgcctgacttgttctcagttcctggaaatttcaaaatgagtggtgacatttatcagtggcatatgttgaggccatgtccagatcattccatctttaattcctcttgctgtctactgacatccggcttcctctgcattttcacttatctgtgtaactaaagagctaagctatgattctaaagatgatgcttgtgtgacaactctccacaagtactatttcaaatctgaatatatatattcttacaacccaggcagcaaatagtgataagttccaatgcaataaaagatgcaatgctgtgagaataagtaacccttcttttttgtgaccctgagttgcatttccaggagttgtagactttgtacccatccagacacactttgttttcttttcttttttttttttttgagacagagtttcgcttttgtcacccaggctggagtgcaatggcgcgatctcagctcattgcaacctcgacttactgggttcaagcaattctcctgcctcagcctcccgagtagctgggattacgggcgcccgccaccatgcccggctaatttttgtctttttagtagagatggggttttaccatgttggccaggctggtctcaaactcctgacctcaggagatccgccccctcagcctcccaaagttacaggcataagccactgcgcctggcccagacacactttctcatccaattcttccccttctccaacacctccctactcctcaactcccaaataacctcctggagttgtctgtagccaagaattaggacaaatccaggtgacccatgtcagtcctgctggtctcttcccccagtgtttactgccttttctaactagttgcccacagaatatagaatgaagatatggaaaagaagatgaagataattatgcttatttaaaacagcaagaaagacctcaaagtctgtaatttataaatatggcattttcagttcatagtttatcgttggtatgtcaccacttaatcttttgttataggacatattttagaaggttttgagattggaatcactataattaactgaaaactgtaaatcaataggataggcgagcttacagtatcactaatggagccttgtggttcattcatttttaaagggatcaacctgattatgattgaacctcctcttcaatgagggctcttatgcatgctggccaggatctgacacatgatgttccaactcatgattctatttcagttgtgatatattaaatgtctgagcataagagaggaccactggtctggtcaattttgagatttagccgcacagggtgaggacacaaatatttgatcaagtgtgaataaaagtccattatctccttagctagcaggtctagctcagcctttccttggcagagtccctgattcccttcacccaagcacctaacaaaaccagacaaacctgacaatcattaacattctcatccagctttgcccaactacttcctacaatcccatctagatttccaaagctggggctatctctgacccaatttttgaggccctttgaggatttcacaggtaaaggactttacactatttaacttaagtaatcctgatatataaaaatttatataaatttataaaaagaataaattaagaaacagtaatgctccttataaaatgtttcaaataggtcttctataaatagcaagttcctctgcatttaaaatactattctgggccaggcgcggtggctcacgcctgtaatcccagcacttgggaaggctcatgtgggtagctcacttgagcccaggagttcatgaccagcctgggcaacatagtaaaatcctgtctttaccaaaaaatacaaaaattagtcgggtgtggagccgcgcacctgtagttccaactactcgggaggctgaggtgggaggactgcctgaccccaggaggttgaggctacagttaaccacgattgtgccactgcactccagcctgggcgacagagaccctgtctcaacaaacaaaacaacaaaaaacccaaacaacaacaacaacaagaaaaacacgctaaaatactattctttttttttttcttaagatgcggtcttgctttgttgcccaggctggaatgcagtggtgcagacatagctcattgctgtcctgaatttctgggctcaaaggatcctcctgcctcatcctcctgagtagctgggactacaggtgtgcaccaccatgcccagctaattaaaaaaaaaaattgtatgtggcgggtgtcaccaccttgcccaggttgtctggaactcctgggctcaagcgatcttcctgcctcagcctcccaaagtgttaggattacaggcgtgagccaccatgcccagcttattctgttttttataaaatgttcacaaaaaccttttccatgaacacagatacttggtaaacctgtttttaaaaaagttttctgacaagctaagttcatctagcccagctgcctgcagtggtaacctgctcattaaccctcactagctcatccccattccatttttcactttcccttctctttgacttgtgcttctgggatcatctcccaaataaactgtaccaaaatccttgtctcaggatctgtctttgagagacccaaactaagctaacttcctcttggcagacgtggcaacgtccatggctctggtggttagggtagggtgttggagctgccctgtctgcttcttcttttcctgccttttgatctgtttctgcatcccacgccttccatcctgttgtgcactagagtagttgcttccttttaattcaactgaggcactagttaaaaagactttgactctaccaatggtcatagatggtctttcaagggctgaacctggctgccaaatctacagtactatccatgtaccagtaacaactttcatcactcatgccactctcttccaccctggctaagagatatgaaccatcatacggttgaggccaggttcggacagatcagtgtctcaaaggctctcagaggacctttcgatcatctcatctaatcccctaatctcacatgttagaaaacggaggggcagagaggataagcatttgctcaacacgttgtcaaccagtgaataaaaaatcaggtctgcactcctcccatttaagctttttctgaacccaccacatttccttgcttgtttgcctcattacgcttgctcatcaatactttcattatttatttccagttgacccaagtcaatgagttatatgtaggcactcctctgccctccttaccctgccccattttgaggttgaaaatctatttcccaccacatttttcaacaaagtaaaacctaggcactaagtgatggacaggaggttgttgctgttcacttaaggctcttgcatgattaagctctccctggaatttgtgtgtgggtgcgagaggactgccagtttggtccattgtatcccaggaagataagcattcatagctcgtggcctgccgagctcaggagaagctcatctgccatccaaactctggggagccaaggctaggctgtttctcaattgatctaattgataatctgggttctgttttcaattgtgacactgggtccctgcctcagctttgctttctggttccacctaacatgtctcgctttcttgctttccttctttctctctctctctctctccctccctccctctgtcaatggagtctcgctctgttgccgaggctggagtgcagtggcacgatctcggctcactgcaacctctgcctcccgggttcaagcaattcttctgcctcagcctcctgagtagctgggactacaggcacgcaccaccactcctggctaatttttgtatttttagtcgagacagagtttcaccatattgactaggctggtctcgaactcctgaccttatgatccacccgcctcagcctcccaaagtgctgggattataggcatgagccatcccgcatggccagccttccttccttcctttttttttttttttttttttgacggagtcttgctccatcgcccaggctggagtgcagtgtagtggtgcaatcttggctcactgcaacctctaccttctgggttcaagcgattttcttgcctcagcctcccaagtagctgggactacaggtgcgaaccaccaccaggcctggctaattttttgtatttttagtagagatagggttttgtcatgttggccaggttggtctcgaactcctgggctcaagtgatctgcctgcttcggcatcccaaagtgctgggattacaggcgtgagccactgtgcccagccatcttgctctatttctcagggttctctgaactgagtccgctgcccagtggggccagtctcctcattcttttaacttctcattctttgtccaagcaagctacattgttttcctccctatgtaaaatgtcaaattggtatttattttccactgtatcaccttgattgtccttttgggtggatttattttgtgtcctcaacagattattaaggacaaaggcagtgacaagactacctcctggcatcatgtactacccacagctttttatgaactgagcacttgtgtcccctcccccaatccctccattcatttgttgaagcttgaatccctagtgtggctgtgtttggagacagggcctctaaggaagtaattaaggttaagcaaggtcttaagggtggggccctgatggataggattagtgcctcataagagacaccagagaactcattctctctcctcaagcgtgctgaggaaaggccatgtgtaaacatagtaagaaggaggctgcctgctagccagaaagagaaccctcaccagaaatcgatttggtgagaactctgatcttggacttctagcctccagaactgcaagaaaacaattttctgttatttgagccacccaggctatatagtattttgcaatggcagcccaagctaatacatgggtgttgattgaaaacatggcccctatgctgggcgctagagtggagtttcaagctgggcatgtgtacactgctcctgcatgaaaaggtaattaactttggttttgggttcaaaactaaatcttcctttattgctaccatttagtaattcccatcctttactctgttgtgacagcatcctcccaagtgtggacatcctcccaagctctgaaccacaaacaaatctcttaccttcttttctacactgccttctggcatcgtatcagatgccaagccttagagaatctgctgtctcaagacctcttatattaatatctcctgtcaccctttattaccctggcataggctcttgcctcttgcttgttcttctcatttccagtcttcatctggtatgcagaggaggaaagggaggctcagaagaaacacatgccaggttgcacaactgaccaataactagggttcaaacccagttcaattttgcccaaatccagcatactttccactagacctgtttagtactctttccatcttgctaaaatctacactgttctgctttgtactatggttatttgtgaagctgtcttatgcctattatcagtgtgtaagctctttgagggtaggctgtcttgatcttcctgatatcccaggcaatggctaagccagcgccttgcactgtgtaggcacttccagaataggtaatgactctaaagtgggagataatggtcacaatggtgatatagacatagcagcttaggagagagacagatttaaagaaagcctgtaggagaaggaagagatgattttgagttgggcttgaggtgatgaaggaatttggatagattgagaggaagggttggtgtgaggtgggcttcaatgtcatgggtttggagttgaatctgtggaaggaggctgctttggaaggggccctggcgtttctgcatcaggtctagttgtgcatagtgagcaagttacttaacttttttaagggctggttttctaacatataaagtgggaataatggagtgtcatttggaattaagagcagaataatgagataatacatgtgaaggacttagcacgttgtatcatctattattaataataaacacttaaaatgttagcaataggccaggtatggtggctcatgcctgtaatccagcactttgggaagccgaggtgggcagatcacctgaggtcaggagttcgagaccagcctggccaacatggtgaaaccctgtctctactaaaaataaaaaattagctgggcatggtggcaggcacctgtagtcccagctactggggaggctgaggcaggagaattgctggaacccaggaggcagaggttgcagtgagctgagagcactccactgcactccagcttgggtgacagagcaagattctgtctcaaaacaaacaaacaaacaaaaaacaatgttatcaatagtaagatagcctgaaagttcagatgtgtttctgtctagttctctgagtaaattattttatttacactcatagataatgacattgctgctgacaaaaaccaaaattatctaaaagcaccaatacattcataggaatacttggttactataattttccttacaaatggataccaggagcccctctatatattttacccttaccagggattctcatagtcaaaaatttcagaaaccaaactgttgggaagcaggatagtgctatacatattctgggtagagctaacttggctgaatcagagatctggattttgggaacaggctaacctggtgaaaatccctgctccacttccaggctgtgcttttaaggaatttggacatactccttatctttcagtactttgctttccttacctaaaaggaggataacattccttcaaggctgtaaatagagtgctgtgtgtaaagcactcggcacaacgcgtttgtgtgggggagacacagtatgtgcataagaattggtagatgatgatggtgatgtttatgaaaatccaatcatgaatagccggaggccactgttgtcaacgagtgatccctgtaacagcgacgttagctacactgagaacttacacatgcacattctcaggcccattgcagacctcctgaaacgagaactcgggaggcagggccaggcaattggcactttgcctgaagcactcacgttttgagaacacctgtcaggtaacagggaaccactgaaagtttttggacggtggaggaatgcgatataaatgactgttgattcactggcattaaagtgcctaactaccgactggcttccgaggttgccggaagaaacctgttggttgatccttagtgatctccaggttacaaaatgcgggttggtactaagggccccaaacacagtgctcacctaccgagcgcagccaggagcgcagcgccagacaattacaggagctgttttggatatggccgggcagcccagcgatgctcagcgaatcccacaactacaaccacaaccgtaccacacatttagcctgcaaaagcagagaaaggaaaagaaaaccgtgcagggaagccggaaacgagggacttaagggtctcctctctagggtgtgggagagtgggggatggggcgaatggggcgaggagggggcgaggatcgagggaggcccctcctccgctcggcaacaccgggttcgggtccctctagagccgggacgcggccggcgggacacacccttgccctgggagacgcgagggtccatggcctcttagtgtcggtccagctcagtttcgtgtcatttgttgttagcgcgaggtaggggcgtttccccaccccagctcctccccggggaaatcccagcccgcttcctccccgctcctgcagttttcgggagcgccgtgcggggtcgagcgcggaggccgcaccctgggcgccgggcgtcgtgtcgggaccgctgcccgcgctgcccgccggcgcggccattgttcgagccccacccctgatgaatattcacgccgcgcgggcgcctcggcccgcgccctacccggcagggctcggggtgtgagtgcgtttccgccggtttttcctgcctgaggaggaaagggggagctgttttctctctcctcagaatatatttttggtgtcccgtttctcctcctccagcgccgccgccgccccctccctccccacctcgctccccgcctccgcctccgcctcccgggttatctttgtctcgctgcctcgcgctcactcgctcaactcggcgccgccgcggccccacgctccgggcccgtcctcgaggcgcgcggcgcggggcgcgggcgccggggcctgaggcggcgggcgacgcccgggggcctgacggccggccccgcgccatggtgtgagcgccgccgcccgtgcacgctccgtccgccctccgcgcggcccggccggcagagagccccgagcggcccgagagcgcagccgagcccgccgccgccgcccgcggccccgcgaggagagtaccgggccggctcggctgccgcgcgaggagcgcggtcggcggcctggtctgcggctgagatacacagagcgacagagacatttattgttatttgttttttggtggcaaaaagggaaaatggcgaacgactcccctgcaaaaagtctggtggacatcgacctctcctccctgcgggtgagtgggcccgcgagcgggcgcgcggggagcgggcagccggcagccggcagccggggccgcgcccaggtcggccgggcgctcgggcgccgccgtgggcagagccgcggggcgcggcggcccctttgtcttcctgtgcgggctggtgcggggcgggcgctaccctctaccgcccccacgccccgagcccgccgcgcgacccccgggcgctgggggaccgcgcggggcgaagcccacctcttttgtcaccgccttttctctccaactgccttgcttgatttattcatttttttggcttcttttaaatgataacccctcccctccttcctctccaggatcctgctgggatttttgagctggtggaagtggttggaaatggcacctatggacaagtctataaggtcggtgtgggcgccttctttgtttcccgtggcatgtggaaacttcttattgggggacgaggagagggtgataaacatgctgctgactggaggccacgccgcttggccaaagttgggagaggggtttctttcgccttgcagtccctctgtttttgcacaccgagtttatattcagactggccttaaaagacctcatttcctggctttgagataaggaaataagctacactcttaggcatgcactttacttcgataaaatggaaaagcattttttaaaaataagacaacctgaattttttctttttttccccaaatccggccttctgagtttgtgtgtaaattgaaatacagtggaggcgggccttgcctctgacgatcctaaaccactgctttggccatcgtgaaaattgtcatcatgtttcagcctccactcagtgcttgccagttgctcaaggtggggagtttggcgttacctgggaatactttataactgtggttgtcatcctttctattgatggatacgtattttggggaagcagggaggagtgtgtgtttgggcaacagcagcaggaagaattacagtgtggggattataaaatctgaattccaggaataacctgtttgacagctgtgtaattgaaacagaaatgacagagagcgaagagaatatagaggatgccctggtttacacccacccaggtctttctcttttttcaaaattttaacacccaccctccaccccagcgataaatgaaactagcaaatctggagactgagtctgcgctgagtagctgacacctgatgtgactaacagtgttcattttatacattgtacagtctagagattatgaaagatgtgtagggaatggaggcgcaggccttgaaaattcagaacggaatgttaaatttttcctgtcttaatttgtttctcaatactgaacgttttctaaaagtttaatctgcactgggggagtgttctgttagagtcggtacaaggttagggaagcagggctctgtggttcaccatgaagaattgtcattgtctcattaaaaatgggtggagttgggggggttggaagccgactgtagaccttttcttaggctagattaagtgtggatcttattgtctcttttctgcgttgtgagtagagtttatctatcacttgaacgcctctccttagcctagacttctagcctgggtagtgtactgtactggactgtggtccgaacttgggtcagtattcttaggtgatctcaagtgtattagcttgtgttttgttggttaactgttcgggccggggccagatttttgaatttgaaagagagccccgttaactcagcttgcccggctcaactgaatttggaaggctttggaaaattttggaaaagattgtgttgcaactcactgagtggttggtaactggctaaaagacattctccccggtctgttgtttgtttaagcaccagtcattttttttctaacccagttttttctcgccaaattaaatggtgattgtagtcttccaagtgaattagccagagcttgtttttgacctggctacacagtagttggattgtttgtgtcttacttggtcagcatggatgttaagggcagagaagtaagctagaaggcgatatagtctttaaaccttaagagaaaggaaagaatgaaaccccagtttgtctttattggttttaagaggtgggagctgtttatggtaagagtttagtcaggttcattgttatttcccctcattgccattttggttccattccccgcaaccttcccgagcttttgaactaggtttgctgagcgctagctacgtttggtaggtatttgggatactggcatgacacagctctctgactacaaagtcggtacagttgagaatttctctaattatgcaaacctagggaattaaatctgtgcaaaagttgcctacagtccagaacaaaatagtgcctgagattttgctcataagcagttacatttttatattattatggaaaatttcaaacataaagactagagagctcagtttatcagcagatgactaatcttttctcatctgtattcttcttttcctcctttattttaatgtaaaccccaaatgctatttcagctgtaaatactttagaatgtttcttttttacacaatcacattgttgttatcacacttagaaaaatgtcatatattcactattaacgttttcttgattgtctcatacatcagtaaaatgtgtttttttttttttttactataacaagttctttaatgtttacaagcgggtactgggaacttcaatcttagaagtggtgaaaatagcagaacatctctttttttcctctttttaactatttaatttctagaaccatttacaattatgtgtaggagttaatttaggatttttgttggtatgatttgcttgtggtagatttgggattacattattaacactttagagtttgtttattgctgctaaacatcctttaggatgaatagcattaaagtttgagaaatacttgttgctgaattgttatttataaaaaggtctttatttttaaacataatttcaggtaaaaaaaatctgtaagctgaacaacttgtcctaatttattttagtgtcatattttctatttttcattagcgcagatgttgcttattttgaggcaactatatttacatgaagtgagtgagttgaaaagagggagttttctgagatttgatatgtcgtatgaaatagcttcttttggggcgaacgactctcctgcaaaactgtgctaatggtagacccctcatttatggaagaaagggagggggaggggtgtgtgtggcagtagggctaagagtgacctttgggaatggtagaaaggttagggagtagtgggaatttcaaggagatgttatttggacttgaggagagacatcttctttaagcattgaggagccactgaaaggttttgttggaattggggatccctgagagtaggggacttgatccagttttttggggataacttctaattttctgtgtctctgacaacagtggtaaatggtctggtatagttgaacagtatgtaacttcatcttaaaagaaggaggtgaaaaacggggtgtattctgtttagagaaatttattttcacccttaggtttttgagagacggatactcataaacttaaaattgtaaatttctcttcacaaggttacattcagagtaccatatatttataagagaagtgtctggtatgatcagtgaggagaatgatagtgtgaaaaattaaaaccagaaataaatcaagtttgtttccatgttattttggattttattgttattttgttttgagacggaggtttgctctgttgcccaggctggagtgcagtggcaccatctctactcactgtaacctccgtctcccgggttcaagtgattctcctgcctcagcctcctgagtagttgggattacaagtgcgtgccatcacgtccagctaatttttgtatatagagatgggttttcaccatgttggctaggctggtcttgaactcctggcctcaagtgatctgcacgccttggcctcccaaaatgctgggattgtatacaggcatgagccactgcacccggccttattgttattttaaatatttatttgaccatttttgtgttcttggggtaactactgttattttgcattttgtgagcatgtgatggctggtgttccaaatgtcttgaataaaagattgtcaaccggacgcggtggcttacgcttgtaaatcccagcactttgagaggcgcaggtgggcggatcacttgaggtcaggagttcgagaccagcctggccaacatggtgaaaccccgtttctactaaaaataccgaaaaattagccgggtgtagtggggggtgcctgtaatcccggctactcaggaggctgagacaggagagtcacttgaacctgggaagtgaaagttgcagtgagccgagattgtgccattgcactccagcctgggcaacaagagtgaaactctgtctcaaaaaaaagaaaagaaaagaagattgccagcctgaggacaattctgagtcttggaaggactgacagaggggaaatccggtaacagtaacgtggaagtcagggagtttagaatccagcaggtaaaatgtctgaaatcaaggttcactcaaaggagggaccatagattttgtggaagactgacccattctgatcttgtcattggaggaagggtacaatgtggaccttggagattgaggacaagggtaccctaggcccaaagaccttgatggtaaggggagctaacgctaagagtttgctcattcgatgcccatttgacactgtgctcatgttagacccctcatttattgaagaaagggaggggagaggtgaggtgtttgtgtgtggcagtagggctaagagtgacctttgggaatggtagaaaggttagggagtagtgggaatttcaaggaggtattatttggacttgaggagagacatcttctttaagcattgaggagtcactgaaagattttgttggaattggggatcccttagagtaggggacttgatccagatgtgtgttgggaaggagctggtaaaatggttggccttgggcagtggtccagtgacaggaggtgaaggccgaggcgggatagtggcagtggtggtagagaggaggagaggttggggtggatacttgggcattactctttgctaggtttaacatgttgaattcactcgttctctgcaggctttggtatgtccctttaagtgggtacacggtttgcccacagtattaggaggagctttgggattcccagcactttgggaggctgagacgggcggatcacctgaggtcaggagttggagaccagcctagccaacatggcaaaaccccatctctactaaaaatataaaaagtagccaggcgtggtggtgtacgcctgtaatcccagccacttgggaggctgaggtgggagaatcgcttgaacctaggaggtggaggttgcagagaactgagatcatggcactgcactccagcctgggcaacagaatgagactctgtctcaaaaaaaaaaaaaaaaaaaaaggcgggggtggggtggttaaagtgctaaaattgctttcgattgctcagtggtaaagtgccatatagattgtctggcttttaaaaatcattaggggccgggcacggtggctcacacctgtaatcccagcattttgggaggccgaggcgggtggataacaaagtcaggagttcaagaccagcctgtcaacatggtgaaaccccatctctactaaaaatagaaaaattagccgggcgtggtggcgcgtgcctctagtcccagctacccaggaggctgaggcagaagaattgcttgaacttccccaggaggtggaggttgaagtgagccgagatagcaccactgcactctagcctgggtgacagagccagactcctccaaaaagaaaaaataaaataaaaaaatttgcattttggagcaagtacttaaacttttgtgagggattctctaagtgttatcttttaagtgtagcatctctcgttcttaattggaggtaaagacatccactggggcaaaatgaattttgtagaaccagatgttttcattaggaggagattgtgtcagctgatctgccactgagaggcatgttcaggcttgttctgagacatagatttccttcatgtggaagattctggacttggacaaggtgggaggaagccagccctgttgagcaagccctgctctcaaagagtttcaacccttactttcaaaaactgttttactaactcaaacatcaaaagctctacagaaaagccaaccaccaaacaaaaccctgctgatgatgggtttttaactccttactgcttgaaactttgtgataaatgtacatttatttgcctagctgcaaactcaactcgtattttgccttttttcttaaccaatattttatgtgtgtgtgtgtgtgtgtgtatatatatatatatatatatatatatttttttttttttttttttttttgagatggtgtctcgctctgtcgcccaggctggagtgcagtggtgtgatctcggcccactgcaagctctgcctcccaggttcaagcgactctcctgagtagctgggactacaggtgcatgccaccaagcctggctaatttttgtatttttagtagagatggggtttcaccatattggccaggctggtctcgaactcgagtcagggtaaagtttttagacatacagggaaagatgactaggaagaaaatggagaaggccaaggtaatcttatatttattaccagtgaccattgtggcagcaatggttgttaggttttataatgttatatcactgctcaccaaacagaatttgttcttttgttatggagcaggttcagtaataagagttggtgagtattattcagaagagaagctgcctcttgggttgagtaattaataaagtgattcattgggaggtagtttttgtctgtaagaatctctaaggaatgatcacaatgataagttttaggacatcccgttttaaaaactggactcttacaaactttgttatctagatagcattaggtataactaaattggggagacaaaagtgaaaaacgattaaccatataagggtggtttcatgcaggtactgtggatgtgtgctgggccctgttctgagagttagatacacagtggtaaatgaagccgatgatatatctacccttatggaactcaagaaaaacagggggatggacacaaaatgccagctgtgggatgtcagtcatacattctgtgttgtctgcatctccctgggttccctgcccagcacacttgtgttcagacacaatgaatgcactgacacatggaaacagcacatactgcaatgtgttcattttaagtggctcaacctcatcagcagggcttctctgtgctttaaattacagtaaaaacaaatgaaaagtgaaatgaaaaggtagacatatagaatatcagtctactttttttactcgtagaatcaaaagacattttcccatgtcaaattgctgtaaaagtttttgtttttgttttctttttaaaaaagtataagaaactcaggtgatataaaagtttttatatacttttaatttcagaaatgatcttgctgtggtcagcagaccacactttgaggaacactgaactggcaggattgaatttgtagcagggctcttagtaaactgtgggtggttggtgtgttagtgagctggagaattgaggactgttgtttgtgcctagtatttggttctcccaccctttgaacattggggagctacagcaggtgctgcttacagctttatgctttagtgccaaaacgtctttgacccctgtgctttggaactgtctcagatatggctaaatatgaacaagttatcctattaaatttaaataaatgaaagaaaaaccccacttttacattataactttaaaaaatccttcatatgataaatagggccttaacttaccagttatgaatcgatagttataatcaaatgatactaaagcgctcataccaaaagtcagagtcatcctgttctccagaagcatgttttcagtgcttttagctgctacatctgaaatttattgctatatttgtaaattatgtacttatgtggctagttcatttatcagttttatacatttattgacgtcctctagcagtagttgtagttattgaactagttagttcaatagtagttgaatatttaactcctatacttgctgcctcccttaagtgggcataccataattttgggttaaagtgatagttgtttcttttatcatgactatgtaaataccatttatatgtgagctaaacagtctcatacgattacatttccttttttaaacaacacccctgcccccacatcgcttttagtttttcatttgcttagttttctttgtacctatcatcaccttcctcctcagataccctaaaaggtataacaaatgcctaacaaagtttagtctttatcacattttccaaatgcttaatttaacaccacacgtcagataatttattgttgcaagataacctgttgatttcaattttttctccctggagtttcctcatagctatgcaggtatggttgcccctggacctggcatgtagctattattgtcctggaatgtctgtttcctggatactgcagtcttcctttttggtttactatcttactttcctgaagcacatcctctagtagttttaaaagaaagggtatatgggtattaaggttttaagtccttgtatggctgaaaatccctttttcttatcactgcctcatcttctcttgtctggaacataactgctttcgatttctttagggactaaatctctggtttcctgtgggtatggagtgatgtgaggcagttaccagactgtgtaaggcagagaaaggggacctggggctttcaaccactaaatatgcaaactttcatcagttctgattttggccttgcacctcacttggtattggtttattccaaatgatgaccttgtcagggttttgtaggtccaactgtctcacttctttttggtatcctttagtaggcacttaggttgtaatttttacctcttagttactactccatccactttttattttatcttttttttttttttttttgagacagtctcactgttgcttaggctggagtgcagtggcgccatcttggcttactgtagcctccgccttgtgggtacaagcaattctcttgcctcagcctcccaagtagctgggactgcaggtgcggaccaccatgctcggctaatatttgtacgtttagtagaaatggggtttgactatgttggccaggctgttatcgaactcctgacctcaggtgatccccctgcctgggcctctcaaagtgctgggattacaggcatgaaccactgcccctggtctgcctgtctgtctgtgtcttttgagacagagttttgctctgtcccccaggctgcagtacagtggtgtgatcacagctcactgcagcctcaacctcctgggctcaagcaaacttcccacatcagcctcttgaatagctgggactacaggtgtgcaccaccatgtccagctaagttttttttttttgtttttttttttttttgagacggagtctcgctttgtcgcccaggctggagtgcagtggtgcaatctcggctcactgcaagttctgcctcccgggttcacgccattctcctgcctcagcttcccggttagatgggactataggtgtctgccaccacgcctggctaattttttttttttttttgtatttttagtagagatggggtttcaccgtgttagccaggatagtctcttatctcctgacctggtgatccgcccacctcggcctctctaagtgctgggattacaggtgtgagccatcgcgcccagcccacgtccagctaatttttaaaatttttagtagagatggtatttgaccatcttgcccaggttactggactaaagtggtctgcctacctcggcctctgaccatccactttttagctgtcaaaacctgatagaaatgatctctactacctcttttcccctttatatctttattcttttgtttactttaaaatcatttttatgggaattaattcttaataactcatgtgatcagtccaccatgtttaaccaaaagttgtgtctttgattttggacttagggttttgctcaggtgtttgtttcttttcatccagaacaataacaataccaacagaacaataacaataccaatgaaacaataacaataacaacaaataaaaaatgaaaacaagggtaagcagtgcgtaacctctgtgaccttactgtgtgacctctgtcagagatacttaatttgggaggtgcaagccgagggagatgaggatgaggaataaggaaagtgaggcaggatgccaagcagtgccatggtacgtattaattaccatgctggctgctgctttgaacaaacctttgagagatagaggagtttgttcagcagtattttttttttaaagcagctttattgaagtatgttttctgtattatgaaattaacccaattcaagcttacatttcagtgatatttagtaaatttactgagtggcacaaccatcaccacaaatcaatattggaacactttgatcatgccagttagattcctcgtagtgatttacagttaatccctgttccaacccagagccccaggcaaccaataatctgccagtattaatttgccttttttgaacatttcatttaaatggaatcctacaacgtatggtcgcctgtgtttaatgtttttgaggttcgaccatgtagcagtgtggttctttgttcctttttattgctgaattttaggctatggttgtaccacatttgttacctgttcaccaattgataggcatgatgttgatggaactgcaccttaagtcatccacagaagggagaaaggagggggaatttatctgtttgggtcttcttgtttccctttagtgtaaccaaacacttggttctgatgaccctgagtgactgtctggatgagggaaaagcagttgaagttttgtgtccctgaatcctttatcttccccagtcttattattagtcattactgtgagtttatttatttatattttgagatggagcctcactctgtcgcccaggctggagtgcagtggcacaatcttggctcactgcagcctccacctcctgggttcaagtgattctcctgcttcagactcccaagtagctgagattacaagtgtgagctaccacgcccagctaatttttgcatttttagtagagatggggtttcgccctgttggcaaggctagtctcgaactcctcacctcaggtgatctgcccgcctcggcctcccaaagtgctgggattacaggcgtgagccactgtgcctggctttaagtcatttttaaaaacaagaatacagtttctttcttatcgctatgaagacaaactattcactatcagcgaggtcactggtagtaggaactaggccaaactagtttttccttctatttttgggaggaattcccttgtataatagccagctatttaccatgtgatgctagactgcagttttcctttatctcaagcagaagctattgtcttgcctggattttgaaaaaacaaagcaaaatatgttatctttggtcagaaggatgtatcccaagttaaataaatgatttgctatgtgttttgggcgaataagtttgctcatttgtttcaagtgtatttttcagagtatttttcttatattttattcttaagtttttttgtgataccttttgttagggccttactgcattcagattacataaaattaagttaagtaatagtttattttttgaaaattcttatactgcagagctttcgttcttacttgctgtgacagtgacagaatactgttgactaccagagcccttctccccctgagtttttctgagactctttatgtgtaattggtgtgtagttttatgacttcaattttgagaggtatgtcaaagactgaatattatctgagttagggctgtgcatcaaggtacttaataatttgttggagatcccggttgaatattgcctgaggttgagtgtgtacatttaagtgacacaattcactgggtgtattcattcacctgctagggcatgactcagattctagggccattccagtttgaacttggcatattagagcatcttagttctctatatgtacacattttctcatttattcttgttgccttccttgattcccagaaaaatctgacaggtgttcagctctttactcttcagtgatttcaaggcttggtttctgtttcttgtttcactgtctacagatattttgagcctactctgctagtcaagatttcctttatttatttatctagtacttaatgtgtttataatatgtgccaggcaccatgcgaggcttgctcactggtgacaatggacaagaaaggcagtcagcttatgcccttgtgtagcgtatagcctaatgtgtaaggcagaaaatgaacacacagttaaagaggatgatattgcagatggggaatagcaggggcctatgggagtgtgtgacatgacagctaagttagagctgataaaacagatacggtggtatgcacagtgaagctttatgatttcaattcagatgctctagatgaggcatagatatatgtggagcagtgaacagtctgctaggagttaaaacccactgagctgatgattcatcatcttggttaatactactttgaataaagataggaggggtgtgttccattgattatggtaattgactgtcttcattcagtttgccttgagccagctgtctctcaggaagccttgcctcctacatctgcactgtttggtgctccttgcatttgaatctcctgtatcagttagaagttagcatcctgaacattctcatatgggtgaaggaggggccttcgtcaggcttcagattgtcttatgagcaatatctggaataatatttggtaaacagctggcctgaagtaggccacattctgccctacattacacatggggagactgctttgttcagctgctggtccccacgacgttagggctgaaagggacctctgtaaaatgggaacaatggtgtacaggtttgtgatattcacatagtttttaataagtttctgtagttccggttatataacaaaataattaaaagataaagtttttttgcttttttttttaagacagagctgcaacctctgcctccagggttcaagcaattctcctgcctcagcctgtcatgtagctgggattacaggcatgcagcaccatgcctggctaatttttgtatttttagtagagatgggttttcaccgtgttgatgaggctggtctccaaatcctgacctcaagtgatctacctgccttggcctcccaaagtgctgggattacaggcgtgagccattgggcctggccttgctctttgataatatggacaaaagagaattttatttttctaatccgattaggtaaaatgatgttgtggtttttttttgatgttgagtgagatatttctaaccattctctaatcatactggaaaatgggactttgtagtcccattagtatgctggctttcaaagtgtgaaattctttttgcattattttgtataagcaagggctttgtcagtcatcaactccaagattgtattagacgtttcattagttttctagttaattagctgaaaatatattcttattgttatatgaaaaaagcaacttaaatgttgaattttaaataggatgcttatttatttttttcttgtctttatactgtttattttcttgctggctctatcagctaaggacttgatctcattggtagtctgtcttgccctttttttttttttttttgctttttaatgattccttttgctgacttattacctataacttctacttaggttgttttataggttgctttaggtttgtagcacatgtttttaacttaccacagtctaccttcaaatgatattataccttactatggtatacctccatttctacccacttggccttatagttttttagtatacatttcacttttatttattatttatttatttttatttttttgagatggagtgtcgctctgtcactcaggctggagtacagtggtgcgatctcggctcactgcaacctctgcctcccgggttcaagtgattctcctgcctcagcctcccgagtagctgggactacaggcgcaggccaccatgcccggcgaattttttgtatttttagtagagacggggtttcaccgtgttagccaggatggtcttgatctcctgacctcgtgatctgcctgccttggcctcccaaagtgctgggattataggcgtgagccactgtgcctggccctattttttattttatttttttttgagacagtatctccctctgtcacccaggctggagtgcagtagcatgatcttggctcactgcaacctccatctcccaggttcaagtgattcttgtgcctcaacctcctgagtagctgggattacaggtgtgtaccaccatgcctggctaatttatttttagtagagatggattttcaccatgttggccaggctggtctcaaactcctgatctcaggtgatacacccatctcggcctctccacgtgcagggattacaggtgtgagccactgcgccaggccgagaaatttgtttgttgaggaatatcaaagatcctggccttggaacattgatagttcactttgaacttcaagggttgattaattaaaagtttctgttaaaccaaaatctttttttttttttttttgagacagagtctcactctgtcacccaagttggagtgcagtgggcaccatcttggctcactgcaacctccacctcccagattcaggcagttctcgtgcctcagcctcctgagtagctggaattacaggtacctgccaccacaccttggctaatttttgtatttttagtagagacggggtttcatcatgttggccagactgatctcaaactcctgacctcaggtgatccacccacctcctcggcctcccaaagtgctgggattacaggtgtgaaccactgcgcctggccttaaaccaaaatcttgattgtgcttaaaatatttaagtaaaaaggtactttgctatgccagtgttccagtttgacagtgatcaattaaaaaatttttaatccctctgctgagtgcagtggctcattcctgtagtcccagcactttgggaggcttaggtgggcggatcttttgaggtcaggagttcaagaccaggctggccaaatggtgaaactcatctctactaaaagtacaaaaaaaatgagctgggcacggtggcgcatgcctgtaatcccagctacttgggaggctgaggcatgagaattgcttgaactcaggaggcagaggttgcagtgagctgagatcacgccactgcactccagcctggggtgacagagtgagaccttgtctaaaaaaaaaaaaaaaaatgctgggtgcgatggctcaggcctgtaatcccagcactttgggaggctggggcaggtggattgcttgaggtcaggaattcaagactagcctcaccagcatggcgaaaccccgtctctactaaaaatacaaaaattagatgggcatggtgggtgtgcctgtaatcccagctacttgggaggctgaggcaggagaattgctggaacccgggagacggaggtagcagtgagctgaggtcgcgccactgcactccagcctgggtgacagagcgagactccatctcaaaaaaaaaattttctaatttcccatcatctgatcctaccaaaaataacaaatacctagggggtttttcatttcatttacaatctggaacctcatatggccttatgacaagagccaatattttaatatctttgtcttagaacctcactcatacaatagagacaaacctcaaatccaatccagagagcattgcttcaaggaacagtggtgacttaagataggttggaagtctaatggtgctgcggaatgctaaacaatcaagccttttcaggtttagtttaatagttgttattcttatactttcaaaaccattttcatgtaatttttttcaactatttattaaatgttagtaaaagaggaactacctgaacacagattttgtccaagcaacctgtttagaataaattatagggaaggaagttttcgctaaaatgcatttcctgtacttgtgaagaaacttgttgagaaattaactttgagaaagttatgccatctttatgcaacatatttatatagttaagaaacataattttcttacatttcaaaagaggctgtttgacaaaaacggctagaagacccctccctacacagtgagaaataacattctacaattatgttatataactaatcataataattttactttctccaaataactataagcaccttatcttccccgttatcaaaaaaccgtgagaaaatgagccttcctaagaagtttgacactgataccagccaactctaaatcaaaatggaaattaacattcctttctaaatcatgtgcagaattcatttgaacattctgataatttccctataaactctgatacgtaaatgttggggctaggaggaggcttgaagattatcttgttcaaactctctggtaaaagaatgtatctaagatttgttccataggctgcagtccacttcgggaatcatggaactcatcagtcacataaatggaactaagataccttctcatagttaaaaaaaccagcttaagaaattcttgccacccaacttttcttctatgaatctctcaataatttttcactattcagagaatgtggtaaaaataagaggcttcaagacccaaaagaacaaatgtatgggaactccatacctgcattagtctgttagggctgccataacaaaaggtcacaggctgggggcttcagtaatataagtcattttctcatagttctagaggacagaagtccaagattgaggtgttggcagagttggtttttcctgaggctcctttttctaatttgcaaatggccaccttcttagccttgccttttgtgcacccctccctggtgtctgtgtccagatttcttcttacaaggacagcagtcagattggattaaggttcactctaacagccttattttaattcagtcacttcttcaaaaggccttgtttctaagtctcaatcactttctgaggtactggagatgagagtttcaacatgtcagtaatttttgggggatcacggtttcagcccataacaatactgtaaagtttttcttgtactgaagacacagaaaataactttactctaaagtgctaatgatttattaactaacacaggtagaatatcccttatctgaaatgcttgggaccagaagtagttcagatttttttggattttggaatgttcatattatatttcatggtataatatctctaatccaaaagtctgaaatccaaaatgctccagtgaacatttagtttgagagtcatgttgatgctcaaatggtttaaaattttggattagggatactcaacctgaaaattttgaaccttgtttttttaaactaaaaaatacatagggtcttctaatccaggggtccccgacttctgagtttcagacaagtactggtccttgacctaataggagccagtccccacagcaggaggtaagcagtgggaaagcaattgaagctttatctgtatttatagccgctccccattggttgcattactgcctgagctccacctcctgtcagatcagtggtggcattagattctcaaaggagcatgaaccccattgtgaactgtgcatatgaaggatctaggttgtacactctttctgaggatctaatgcctgatgatctgtcactgtctcccaccactgccaccccctgcctaccttcatggaaaaagtttcttcatgaaactggtccctgtgccaaaaagattgggactgctgttctaatcagataaatagcatattcattagtatattcattcaacacaaaaatactacagatggccgtggctcacgcctgtaatcccaacactttgggaggccgaggtgggcggatcacgaggtcaggagattgagaccatcctggctaacacggtgaaacgccgtctctactaaaaatacaaaaaattagccgggcgtggtggcaggtgcctgtagtcccagctacttgggaggctgaggcagaagaatggcgtgaacctgggaggcagagcttgcggtgagccaagattgtgtcattgcactccagcctgggcgacagagcgagactctgtctcaaaacaaaaacagaaacaaacaaaaaaaactacagatgctattttagatgatggagataaaggatggcaaaaaaaaaaaaagatacagttcgtgttttcatggggtttaaagaaggcagtaaacccatcagatggtggtactatatcagttagcctttgctgggtagcaaaccatgcctgaaacttgctggcttcgtgttgtataagcatcatcatctttgttcatacttttgtaggtcagtaatttggactggggcatactcagtgtggtagtgtggtggctcttctatccatctcttctaggatctctccggaagctgaagtcagctggcagttaactgggggctgcatggtgtgacttgggttggccgactttttaagcaccctggccttttgtttcccatatctcagttttctttttgtctcctttcttccttttgttgttcactaaggaatatttaaaaagtttcgagtattataaaacattcaacttttggggaatgagatggagatataataaatggagataaatatgtacatttaatatcttcattttacaaaagaatctaatcaccattaattacagtgttacagtatgccctgttacagctgagagttagggttttgcatccactaatttgggtagggtgacaatagcaaaatgataaataagtcatgaatttagcctgggcttttggtgctcaaataccttaattcatggatggcaacaccaacactctacctgcttttcttagctcaacaggaaatgagagtagggcttgggcaggaggaagtcatgcatacccagctgtcagcgtgcggccttctcattggttgtttaggagagcaaacgaagcttatctccttccccaaattgttgataatgaaggcgaaaagagatatagctacaggtaaactagattgaatctgctgtttatgtgttggaagatgacgtttgaagatgagttttagttcttagcaccaatacaacaaatgatgggatttgaggtttaagtgcctaagtttaaggctctcatataataactcttaatttctttttgtgtcgggaaaagaacaaactcttgccttgaattaaccagttattttaaaaaatcatagacttctgtcattagaggaaacggcctgaactccattaccaggtgactttttagctttagtgggtggcacatgggactgtctgtggtgtgccatctgcagtgcgcaagccatttgtttctggaaacagtctcacaagcaatgattctggtgagtttagaaatgaatcaggatgtgctaagctcaatgaggactcattagccttggataatgtgattctataaatgaacagaatggagacggtgaagactcaggagtatagagaaaataggatgacactggaagctaggctgattggtgggagttttggaatcaatgtgcttcaactattagttgattaagcatatagttgaattagtaaagagtgggagacttgccccttgactgtgtgttattaaaaaaaaaaaagctatcttggccaggcatggtggcttatgcctgtaatcccagcactttgggaggccaaggtgggcagatcacctgaggtcaggagttcgagaccagcctgaccaacatggagaaaccccatctctactaaaaatacaaaattagccgggcatgatggcacatgcctgtaatcccagctactagggaggctgaggcaggagaatcacttgaacctgggaggcagaggttgcggtgagccaagatcgcgccattgcactccagcctgggcaacatgagctagactccgtctcaaaaaaaaaaaaaaaagctatcttgagtactgacatggtccaccatctcctttatgtacatttcctcaccttaatttttattttgcatgtgcatggagaggttaagtaacttgcctaaagacacatagctaggaagcaattggagaaaccaagtgttaaggcatttcagtcctgacttctaagtttagctcttaacctttttgccagattt

SEQ ID NO: 503 - DNA, 19934 bp, Homo sapiens
tacataagtctacatatttcttcataacacttggtatctttggcctaaccaacctctatatgagcagagataataaatccaatacaaaatcaaacttgtgcaattgtgcaattaagtaaaaaaacaaaaacaaaaacaaaactagtttctggtaatacggggatacaccatcctcaagaaaaagttgagcatctcaacaagttacttaataactactataatgcctatgtagcagcactggttttcacatgttttaaattaatacatatccgaatctcaacttccaagcgtatgaaataaaacctaaacagtgaattgatacaaaatatggcaagtgtgttcaatccctaaatccagagccaattaagtatataagatcttaaagaagactattaacccaatcctgtctgcaaactgggggatgagtgcagctaaggacagagtcaaaaggaggtatttcacccagcagcaaggtgggtgggcattgtctccagcaccataaccagaggctggtcactgtgcttttatctctggccctagatacagaagacacagaaggagagctgtagttttcttatctattttccagcctctgggctatctttgcttctagtagcctttcatgggcagagtcctacacatcaacgatatgaagccaaagcttagtgctgggaggaggaggtgttaagccatgaagcatcaagatggaaaacctgctttggaatattattgaaatcctagtccgtgtcacacccaacctccttgtgctggtgggaatttttgtttgtttgtttgtttgtttgagacagagtcttgctctaggctggagtgcagtgcagtggcatgatctgagctcattgcagcctctgcctcccgggttcaagcaattctcatgtctcagcctctggagtagctgagattacaggcatgtgccaccatgcccagctaatttttttatttttagtagagacagggttttcaccatgttggacaggctggccttgaactcctgacctcaggtgatccacccacctcagcctcccaaagtactgggattgcaggcgtgagccactgcacccagcccttgctggtgggaatttcaacacaattggcagaaagcagagaggggagagataaacattccaccaggtgaaggctttctggaatagcctgcccacacacagcgcaagatgtcccagataaaatctgagcgcccagcccagtttcaaaacttcagccacaggagtaccatgaacaggcgtggatctactgctcaaagaaatagcctcctcactcacaccagtctttaaaatgactattaaataaatcattttgaatctatttgtcaaactgcggcttccctaaaccctaagcagtgaaactcaagatttgcttgtagaaattgaggctaacacgtggtcttcttctggtccccaaatgagactgaaacacttaaagacttacaatcagtcataaaaagagatatattatcatctcacctagaaaaggatcatctaaaaggaggtgaagaaaaactatgggtgcatgggtgagggttttaattaaaatactcaagctttcattaatggccaagggataaaacctaaagttgattagacacctgcatgtatcagcacagcactaggagctttacagagctcattttatttaagtcctattttagaacaaaggaaacagtcttaggcaaggcaaactcacagttggctactcaatgtcttttatttctgcctgttttttggccccagaaaatgcaatattttgacacagaaaaaaacattaggatgagtgtgaaatcaaatacgattctggtttttgagctgacatttagtcatttggagccacatggctgtcccagggcctggtccccaggtcatgtgcttaaagcttccaggcggttctcatcatgatgatgaagtacacatcagtgtcaatggatgcgctcacacctgcatagtagttcatgaactcctcaggggtcacctgcagtggaaaagttagaaacaaaaacgaaactttgcttctcactctgtcaatgggcgcccaccttgtgcacctgtaaatagaagggaaatagaggatttctttgtgtatgtgatcatggctgaggaactgatctaaaacaaaagaacaagtgaagctgaggatggtgtgagaacagcacctaggaagagagaaagaaagtcttgaaagtttctaagccaacctaaatggaaagtgacgcataggttgtcatcttttgtctaagggtgggagcccgtcggttcaggtaagggagactgaaactcagagtaagaaggaagtgctctgcaactgtagttatttctgtctttctgtgacacgtcagaaacaacatgtcatgtccttgtgtcagggtaagtgatgttttccctttccaaaaatggagttctctcctgtgggtgaagaaacagatttctagttaaacgctcccgggttgcatgcttttctaacacataaataactcattcaaggcccagggtgaataaaaagcttacccctgcttcatgcctcccacccatcctggcttctctccactctacacccatgaccatctctttgaaatattgactaatgtgtttatctgtgtggggattttatattactttcctttggggaaggagaaaagacagttattagtcttatttttaacaggtctagataatatgtacactctaatttaatcatgttggttgacatgatcggttggggacatacctatgccttccaagaatcataagagatgactgacccactggtcctattgaaattataagtgaccagaaaagaaaagtcactggatccacagttgtctttcataccaccccttcccactaaaaacataaggaagggcagtagaaagaaaggcatttgaactcagctcatagttgaactgtaaatacacatctacaatacatgcatagagcctctgtcaaaattaggataccattagcatccccctttgttgaacttctttattcctctcctcctttggattcctcagcctctgcttttcaattccctcattaagggattacattaagtttcacacatcattattgccctctttctatctttctcatgttgtgtgaggttccagggaaatgtttatcagtgtgggtccacaccacctgcatcaggacaacctggggtgtctgtcataagcctaggcccacaggctgtaccccacacctgctaaatcagaatctctgaagcaggtggttgtggaatttacttcttaaaaatctaaacatcccagttaattgttgtgcacactacagtaatttaactgggaatatcaaagataattaagataaagtctcagtcctcaaaaagttgcaggctggtgaaatactccaacaaagtaagtggatcattttacagcaaatagcaagtaaactaaaagagttacccacgagaccctgagccattttgacggtgcactttaccatgacagtttgaggaacattttttacagctaattattttttaattaaaaattatcaaactcccgatatttttagtttgttattgtttctattgtctgtttgttggccagggatgacagccattgaatgagactccctccacatccactgtaataatcctatccctagcttttctctcccacagaagttgaaaaactcaaaactcactttcccagactcctctgcagcttcagcttgggatggccaagtaatagagttctcaccaataagatacaaaggaaatttgacatgaatttctagggaagcctttgctttcctgatgcaggctccagccctttctcgttccctccttctccctcctttgtcctgctgcctgaaactcagatgtgctggctgaagttaggcaaccatcttgagatcatgaaggaaaggccaggaaaatcacaaagacttcagctctgctctctttaagccactcaagtgagaacatcaagtagaataaaaaataaaacctaatttgtgtattccagtgtataataagatttcctatttcttgcaattgaaagcaaaccctaactgaaacaccaatacatgattgagactggtatcgtcacccatccttccatcccaaactcccccagtgggatggggtgacctgagttgagttggctctgttggagaatggagaaggaatccaagatgggcaaaagataaaggaagcattaaacctcacttggaagtcagatgacgtcaagccagaggtcagagctaatgtatttgatcatttcagaaaaagccatcagttactcttagctaggtgtttgcttgttttctgagactcaacttatattgggaatggcctgaatcgcaaattctctgatctcctgtaaatttgccctcatcatagtaaattgttggttagcaataatcactatccttattcattttatttgacattagaaaaaaatgagagactgggcactcctacttttagcaggcctcttgactaggctacctttatgtgacaagatatatatcatatatacaaggaaaggtcccagatgggggtaatggaagtcacaatacaagccctttttctcagctccaaattcatcagaaaaatcctaaaacaaatctaggttactattaatacatacactcagtaatatacctaacatatttttaattatttaaaaattttttatgagatggatgaggcaatagactgatattccctgaaggtctaaagtcctaagaggctttttaaaaatatagtgatgataaagtcatatatacacatgaagaattcaaaacttagatattaaagaataagaagtaaatgtctcaccaaattgtggtggggtttagtgatagaaaaggggtaaggaaagtctgtgtcacaggttatctgattgcttcacacctccatccaaatggcttccggctgctatgggagtccagtgaggtattagtgcaagatttatgacatcaaattccgtgactgctgaaactccagcaacctttatgggtatttgagagtttaacctagattatcaagtttgaacattacctttagctaggagctatgctaaattttttgcattattttaaattttgtcttatatgggatgtttttaaccataaatgagcacactggcttcaagtacagctatgcttcaccacaagcaatcttaatatgcaaaatagtgcaatttgcaagaggtaaattttagaagctaattattcttctcataaaagaatttaccatggagttcctctacaacaacaatttcttgtgcatttaaaatacaattcagtgtgcgaaagtttgaattacacatcacttttcagaaacacttttattatgtctattaaatgagatatccctggtaagcccttagcaaatgcccagttgatatgtgctcaaaaagtgttgcccagattcattattatgctaaatggggtcatgtgtatattatatttagtaattttaaaacagttatttctgaatcttttagagctaaggatcacaaatacacgtgagtgtaagagtcatctggtacacattaaaatgtaaagccttggactccatcctccaaaaaatcagattctgtggttctgcagtgcagctaggaatctacattactaataaatcctccctgatgatgattatgaacagccagagttgggtatcaatacagggtctgtaacatgcagatgacatcaagtgctataactgctaaaaacctcaataacctttatgagcttttgagagcttaatgtggcttcttaagataaatatcaaaaggggtgatgtgcagacttgaatcagccgaatcacaactggctattttgacttttgttagagaaaagggtagctgaggtttcccctggcaatgaggaggaaccacctgcagagaggaagcagacacactctaggatccacaaaggggtgggctaatttggggaaatggcagttggctatttttccactgacatctcagtgatcaaggccagcaatactggaagaaaacatgtagtttttatttctgtccctaagattttggctgccctattgaattttggcccttttgtaaacctgcctccacaatcctcagcctgaaatagagggtatgtctccatccctgaaagggaaatgtcagcaggaagaacagaaaggtcaccttcctatcccccaccccttgctaatgagactcatcatgaagtttcatttaaaaagttggagcacattcccttcagaagaggaaggtttatttcttcttcccttaaccactctcttcttgtccactgggccacttatcttttcctgtgctgtaaagggcttaagagacaatgaaccctggggctgtgctgctgctgactgttactcaagggacaatcccctttccttatcaccaaaacccttagatcatctaagaacagaactggctcagggttttttttttttttctaaaaagtcaatttagggctgttgataaaggacagatgacattttcatctcagcctagacacagtcatggagctatataattccttaccctaccaagctatgcatttgtaacttgaagataaaagttaatggagatgggcggttgattttgttttcaaattcagtgcagtttagaaatgtaagttaatctcaaagcacactaaagaataaatcagagtaaattctgttatttgacattccctttaccaaaaactacctttaaatggcatttccacatagcaaagtgtgaagatgaatgaggatgagtgtgaaggcactaaaacatcctgaaaggccttgtaaatctgttctccaaaattaaattatgatctcatttcaaagttaaatatattttattataatcagttcactggagtgcaactagctgagtatggtaaatatagtaaccataaaatggcatgtttaatcagaacatcacattccccagatgacaggtcatcacttatgtggatcccctaccaatatatttcaatatatgtctatgagtgtgtgcgtgcacaaacatacattaggtttcaactaaagtaacatgaaggtttcccctggcaatggagaagtttctagattgttcctagggaaatagtttacttctatttacaacaaatatggtatcaatgtgttaacatttttaagagtttggacctatttcccatttacaatttcgaattgaagaaatttcccctagattaggctcttttacttaccaatccatctttgtcatagggtgaatcaaagttatccagaaatttcctaaatacttgttcctcactccattccccattctggtactttgggtggtgttttgcattatatacttcacgaaggtcttcgattgttataacaccatctccagtcttgtctaactttctaaaagcttgcatgattacctcttttctggctctggacattggaggctacaaaaatagaagaatacatacagagacatacataagcaaatgagcttttttggtatcctatgtgataaaatatctcattcccctcaacgatgtgaaataatatttgtgtgctattatgtaatagacactacaattgctccaaaaattcctaagtctgttcacagttttctgcttatccccctccccacagtgtactaacaacttgtaaaaacaaaacctcaaggtagccaacccaaaccacgtgaaagccaaactcagcagatacactgattaatggggccacttactcttaatgtgagaagaaattcattgaagtctattgttccatttccatctttatcaaacctccggaaaagttcttccacctcttctttttccatgaccacagcataatcatttaaccctttcataaattctttaaaatcaagggttcgattattatcgtcatccataattctaaacactctgaagaaaatacacacaaaaattcagaagaaatgtacaaataacaggtgtaagtgtaaagattaaaaaaaaatccacactcaaggtttcgtcaaattaaaatacaaaagtcttaaattcttctctgcaccctcctttccaaaactggagagcctcttcccaccacacacacacaaacacacacacaaagtataattctaattacatgacattctgcaaaagacaaaactgtggagacagtaaaaagatgaaaggtaaaggaaagagttgaattggtgaaacatgggatttttaggtcaaagaaactatcctttataatactatgatggtggatacatgacattatgcatttgctaaaacccatagcactttacagagcaaggtgtaaaccttaatgcatatcaattttaaaaaaatgatttaggaagtcagaaaatcacagtgatgtggctatgttagggatataggagccaacttaaatagctctcaagatcaaggctggaacaattaaaccaataaaactatgctggattataacccaaaatataaaaaagaaatccctacatccatactggttaaataaatgatagagtaaataaagatgaagaaaatgacaaatttctcttgcagaaaaattccaaataagttatggatatattctcctctcaaggagggaacatatactccccactctctaagtgtgggctctacaaagaggtttccttccaaaaagtacgatatggaaaagggaaaagggaagcaactttacaatggagaagtctgacaaatactacctcaatcaggtgatcagtgtcaacatcaacagtaataaatcatgttaatcatacatatccttggtataatgtgataaaaatggtgctttatgtctgtggtccctaaaaataataagcccagtttagtcatgaagaaaaaaatcagagaaattccaataggtgggcatcctacaaaatacttgacctctcacattcatcaaaaaccaggaaagtctgagaaactgtcataaccaacaggatcctaaggaaacattacaagtaaatgtaaagcagagttctggatgagatcttgaaacagaaaaggacactaggtaaaaactacggaagtatgaataaattatgggccttagttaataatcatgtgctggcattggtttttaaagtagtctatttaaaaaataagggggtggagcaagatggccaaataggaacagctccagtctacagctcccagcgtgagcgatgcagaagacaggtgatttctgcatttccaactaaggtaccaggttcatcttactggggagtgtcggacagtgggtgcagcacaccaagcatgagctgaagcagggcaaggcatcgcctcacccaggaagcgcaaggggtcagggaattccctttcctagtcaaagaaaggggtgacagacggcacctggaaaatcgggtcagtcccaccctaatactatgcttttccaacagtcttagcaaacggcgcaccaggagattatatcctgcacctggctcggaggatccgacacccaccgggcctcactcattgccagcacagcagtctgagaccaaactgcaaagcagcagcgaggctgggggagggatgcccaccattgctgaggcttgagacggtaaacaaagcagccaggaagctcaaactgggtggagctcactgcagctcaaggaggcctgcctgcctctgtagactccacctctgggggcagggcatagccaaacaaaaggcagcagaaacctctgcagatttaaatgtccctgtctgacaactttgaagagagtaatggttctcccagcatgcagcttgagatctgataatggacagactgcctcctcaagtgggtccctgacccccgagtagcctaactgggaggcaccccccagtaggggcagactgacacctcacacggccaggtactcctctgagacaaaacttccagaggaacaatcaggcagcaacatttgctgttcaccaatatctgctgttctgcagcctccactgctgatacccaggcaaacagggtctggagtggacctccagcaaactccaacagacctgcagctgaggttcctgactgttagaaggaaaactaacaaacagataggacatccacaccaaaacctcatctgtatgtcaccatcatcaaagaccaaaggtagataaaaccacaaagatggggaaaaaacagagcagaaaaactggaaactctaaaaagcagagtgcctctcctcctccaaaggagcacagctcctcaccagcaatggaacaaagctggatggagatgactttaacaagttgacagaagaagactgcagatgatcaaactacttgagctaaaggaggaagtttgcacccatggcaaagaagttaaaaaccttgaaaaaaaaattagatgaacgtctaactagaaaaccactgcagagaagtccttaaaggacctgacggagctgaaaaccatgacaagagaactacgtgatgaatgcacaagcctcagtagccaattcgatcaactggaagaaagggtatcagtgatggaagatcaaatgaatgaaatgaagtgagaagagaagtttagagataaaagaacaaaaagaaatgaacaacgcctccaagaaatatgggactatgtgaaaagaccaaatctatgtctgattggtgtacctgaaagtgatggggagaaaggaaccaagttggaaaacactcagcaggatattttccaggagaacttccccaatctagcaaggcaggccaacattcaaattcaggaaatacagagaatgccacaaagatagtcctcgagaagagcaactccaagacacataattgtcagattcaccaaagtggaaataaggaaaaaatgttaagggcagccacagagaaaggtcaggttacccacaaagggaagcccatcagactaacagcggatctctcagcagaaactctacaagccagaagagagtgggggccaatattcaacattctaaaagaaaagaattttcaacacagaatttcgtatccagccaaactaagcttcataagtgaaggagaaataaaaatcctttacagacaagcaaatgctgagagattttgtcaccaccaggcctgccctaaaagagctcctgaaggaagcactaaatgtggaaaggaacaaccggtaccagccactgcaaaaacatgcctaattgtaaagaccatcgatgctatgaagaaacggcataaactaatgagcaaaataaccagctaacatcataatgacaggatcaaattcaaagataacaatattaacctgaaatgtaaatgggctaaatgctccagttaaaagacacagactgggaaattggataaacagtcaagacccatcagtgtgctgtattcaggaaacccatctcaaatgcagagacacacacaggctcacaataaagggatggaggaagatctaccaagcaaatggaaaacaaaaaaaggcaggggttgcaatcctagtctctgataaaacagactttaaaacaacaaagataaaaagagacaaagaaggccattacataatggtaaagggatcaattcaacaagaagagctaactatcctaaatatatatgcacccaatacaagagcacgcagattcataaagcaagtccttagaaacctacaaagagacttagactcccacacaataataatgggagactttaccaccccactgtcaacattagacagatcaacgagacagaaagttaacaaagatatccaggaattgaactaagttctgcaccaagcggacctaatagacatctacagaactctccaccccaaatcaacagaatatacattcttttcagcaccacaccacacctattccaaaattgaccacataattggaagtaaaacactcctcagcaaatgtaaaagaacagaaattataacaaactgtctctcagaccacagtgcaatcaaactagaactcaggattaagaaactcactcaaaacctctcaactacatggaaactgaacaacctgctcctgaatgactactgggtacataacgaaatgaaggcagaaataaagatgttctttgaaaccaacgagaacaaagacacaacataccagaatctctgggacacattcaaagcagtgtgtagagggaaatttatagcactaaatgtccacaagagaaagcaggaaagatctaaaattgacaccctaatgtcacaattaaaagaactagagaagcaagagcaaacatattcaaaagctagcagaaggcaagaaataactaagatcagagcagaactcaaggaaatagagacacaaaaaactcttcaaaaaatcattaaatccaggagctggttatttgaaaagatcaacaaaattgatagaactctagcaagactaataaagaagaaaagagagaagaatcaaatagacacaataaaaaatgataaaggggatatcaccaccgatcccacagaaatacaaactaccatcagagaatactataaacacttctatgcaaataaactagaaaatctagaagaaatggataaattcctcaacacacacaccctcccaagactaaactaggaagaagttgaatctctgaatagaccaataacagaccctgaaattgaggcaataattaatagcttaccaaccaaaaacagtccaggaccagaaggattcacagccaaattctaccagaggtacaaggaggaactggtaccattccttctgaaactattccagtcaatagaaaaagaggcaatcctccctaatttattttaggaggccagcatcatcctgataccacagccggacagagacacaaccaaaaaagagaattttagaccaatatccctggtgaacatcaatgcaaaaatcctcaataaaatactggcaaaccaaatccagcagtacatcaagaagcttatccaccatgatcaagtgggcttcatccctgggatgcaaggctggttcaacatacgcaaatcaataaatgtaatccagcatataaacagaaccaacgacaaaaaccacatgattatctcaatagatgcagaaaaggcctttgacaaaattcaacaacccttcatgctaaaaactctcaacaaattaggtattgatgggacgttatctcaaaataataagagctatctatgacaaacccacagccagtatcacactgaatcggcaaaaaactggaagcattccatttgaaaactggcacaagacagggatgccctctctcaccactcctattcaacatagtgttggaagttgtggccagagcaatcagacaggagcaggaaacaaatggtattcaattaggaaaagaggaagtcaaattgtccctgtttgcagatgacatgattgtatatctagaaaaccccatcgtctcagcccaaaatcttcttaagctgataagcaacttcagcaaagtctcaggatacaaaatcaatgtgcaaaaatcgcaagcattcttaaacacaaataacagacaaacagagaggcaaatcatgagtgaactcccattcacaattgcttcaaagagaataaaatacctaggaatccaacttacaagggatgtgaaggacctcttcaaggagaactacaaaccactgctcaaggaaataaaagaggatacaaacaaatggaagaacattccatgctcatgggtaggaagaatcaatatcttgaaaatggccatactgcccaaggtaatttatagattcaatgccatccccatcaagctaccaacgactttcttcacagaattggaaaaaactactttaaagttcatatggaaccaaaaaaagagcccacattgccaagacaatcctaagacaaaagaaaaagctggaggcataacgctacctgacttcaaactatactacaaggctacagtaaccaaaacagcatggtactggtaccaaaacagagatatagaccaatggaacagaacagagccctcagaaataatgccacatatctacaactatctgatctttgacaaacctgacaaaaacaagtaatggggaaaggattgcctatttaataaatggtgctgggaaaactggcttagccatatgtagaaagctgaaactggatcccttccttacaccttacacaaaaattaattcaagatggattaaagacttacatgttagacctaaaaccataaaaaccgtagaagaaaacctaggcaataccattcaggacataggcatgggcaaggacttcatgtctaaaacaccaaaagcaatggcgacaaaagccaaaatggacaaatggcatctaattaaactaaagagcttctgcacagccaaagtaactaccatcagagtgaagaggcaacctacagaaggggagaaaatttttgcaacctactcatctgacaaagggctaatatccagaatctacaatgaactcaaacaaatttacaagaaaaaaacacacaaccccatcaaaaagtgggcaaaggatatgaacaggcacttctcaaaagaagacatttatgcagccaaaagacatatgaaaaaatgctcatcatcactggccatcagagaaatgcaaatcaaaaccacaatgacataccatctcacaccagttagaatgacgatcattaaaaagtcaggaaacaacaggtgctggagagaatgtggagaaataggaacacttttacactgttggtgggactgtaaactagttcaaccattgtggaagtcagtgtggcaattcctcagggatctagaactagaaatatcacttgacccagccatcccattactggttatatacccaaaggattataaatcatgctgctctaaagacacatacacacgtatgtttattgtggcactattcacaatagcaaagacttggaaccaacccaaatgtccaacaatgatagactggattaagaaaatgtggcacatatacaccatggaatactatgcagccataaaaaatgatgagttcatgtcctttgtagggacatggatgaagctggaaaccatcattctcagcaaactattgcaaggacaaaaaaccaaacaccgcatgttcgcactcataggtgggaattgaacaatgagaacacatggacacaggaaggggaacatcacacaccggtgcctgttgtggggtgaagggagggggaagtgatagcattagaagatatacctaatgctaaatgaccagttaatgggtgcagcacaccaacatggcacatgtatacatatgtaacaaacctgcgcgttgtgcacgtgtatcctaaaacttaaagtataataataataaaattttaaaaaaaagcttatcgtcattagagaaatgcaaatcatgtcagttagaatggtgatcattaaaaagtcaggaaacagcagatgctggagaggatgtggagaaataggaatgcttttaccctgttggtagaagtgtgaattagttcaaccattgtgaaagacagagtggcatttcctcaaggatggagaaccacaaataccatttgaccccacaatcccattaccggatatatacctaaaggattatagatctttctactgtaaagacacttgcacacatatgtttattgcagctctattcacaacaacaaaaacttggaaccaactcaaatgtccatcaatgatagactggataaagaaaatgtggcacacatacaccatggaatatcaggctgccataaaaaaaggatgagttcatgtcctttgcagggatatgggtgaagctggaaaccataattcttagcaaagtaacacaggaacagaaaactaaacatcgcatgatctcactcgtaagtgggagttcaacaatgagattacgtggacacaaggaggggaacatcacacagtggaacatgaacttcagggggtggagggctaggggagggataacattaggagaaatacctaatgtagatgacaggatgatgggtgcagcaaaccaccatggcacatgtatacctatgtaacaaacctgcacgttctgcccatgtatcccagcacttaaagaataatttttttaaaagatggaaagttggagtaatcagaatctaaagacttttaaatgtccttaaatgctaaaaatttgaactttattagcaagtcatttttaaagtcattaaatggttgacttgaagtgacattatcaaaataatgagaactttacccataagagagctaacagaactctagcaataatgggttgaatgaattggaggactgaaaacttaggagcaaaggaaccagcaagaatactatcataagagtccagtgaaaaaaatgttgagtgtctacacttgagcaattgggatgaaaataagaaaaataaagatttcaagatattatagaaataaaggagtcaatatggtgggctaatgaagataattctaaagttttcaacccaaagacctggaagagtagtaatactgttaaaaccgtaggggctgcagaagaagctctatttggaaaacaaaaaacaaaaaaaatgacttttgttttgtttggattggatactaagtcaactatatagagatattcactggttagctagtatctttcctgattaaaaaaaaaaatatatatatatatatatataaaaattgtgaaattagtttggatctcaggaacggatagcattccaagaacgtggcaaggggccaaggtacagatgtgctaactcaggagtagccaagttgtctgataaattaaggatactagcaaaagaatcttgagaatttagatactagagaagtatctacatttacaaggcaattggaaatgactaagaaagaacgtatactgttgaaaaccacaagaatttcatgtcaaaaaatgaaggtgccaaggttataaataacaaagtcatcttgatcttggtcaggataaagactcagggtggaaagatggtgccgggagtcaatgcttcacagaatgctaaatgttgtgcaggggggatgatggcagagcctaacctgaagagatgcccttctaagacaggatttatgggaaagaaataaatgaacaaaggggtgtgtatgacctgggatttggagttagactgaaggagagtgttcagtcttcaactgaccctaaggtaggagtggaggagaggggcagcttccacttgagttaggagttacttagagaaggccaaggccagtaagtgaggcagatggcacattctgcaaaaggcttaggatggaacggtgtccattgactgtagactggttcccagtggaaaggctggtagagacgcagtgtgcagtgggtatggggtgaagatggcacaggtagcaggagggattccactgagtgaaccagagagtggaagagaggattcctcaagggtttgcactaaggacaatgatgtggacccatgatgaatgggatagaggtggaagtgacacaatattgagggcatgggtgctggtcttcccattggactggggcagcctggccaccagggtccatatccccactgcctggccttctgacagagctgggcttagtctgagacttgggactgttcagagttttctcccaggcactcagtaccttgctggaagtgaagccttccgcatcttctgggtccaaggctagatttccctcccattggcaccctgtacttctctaataaacaacttctcacaccactgagatgccatttagatcactcatattgtccatagtcttagtcctccatgggggcttaagaagccttgttcacccacgggtccctgagatgtgtccaatgcctggcccatggcaggctcttgatggagtttcttataatgcacaggacctgccctcaggaggctcacaatctcctttcccttttggtttctcagtccttaaaactattcacactcagaggacagagggtgggagaacaggagctacccagctgagagaaccccattggcagtgagctatcagttatctgacaagcaataccagtgtccctggaagtgatggagaaatgattgcccgagagcaaaattccaaattctgcaattagggctaactggctgttccttcctccctcttccaccctggcctttattatcacagctgcagagagagtccctctcattgtcctggtaggcatctccatgccagggcacatgctgcttctccctttacctcatattttcccagagctgcactgtcttgtagcagatatgagtcttgccgaatctgggactaagatccaaaaactgtcacaagggacctcatagatcaactcttctaaactctacattttacaaataaggaactgagcccctaggaggagatgacttccccaagaccacgtggccaacattagcctcacctggcagagtcattccttcccgctccattccctgccacttgtagctgggtcctacctgccaagtcctttgatcccagcagagcccctggccaggcactgcagtcggagtctttcaatggggtcggtggccgtggtgagctttttcttggcctggatcgccatctctcggtcatggcgcgctgtccctgccatctgaggggaagccatagcatgttagcaaagtccaggcctcgccgctgcctctggctgggcagagtgacagaagcctcactgagaaggaaatttacagccttctctgtcaggaaacctctcagaatttccaatttttctctatgccaactgtgtgcctggcatatttataacttacttatctagtcctgaggacatctggtttctccagcctagacaataatcttaaatatatcaccatttcccaagatgttttgatctttctgaagccctcttccatccataaaagaagtgcaatttctctatactctcttttttgaaccaacattatataccatattattttatgtagaattttccatattcccttgaccctcacatttaatgttctcctctttggtctaaacattgattttgttgcttctgtcttgaatgagattttcagcacttgatccttaatgattcttaccagtaatgggtatggtctccttgattcacaggttagtatccactaacacctaatgaggttcttaggatgggtgcagtgaagtgctgtctcctgagtggtccccaagggacgtacaaactcttgtagccacacttgagctctcaaagcttgcacaacagtgggaagagcacttagctgggggcctggagacctgggttatagtcctgactcttcaatccccacccctcaactcccccaacccctcacccccatctgcctggtaacctgcctgtgagtgaatctcacagcctgtttcctcctcttttaactgggaggattggataagatggtctttaaattccatcccagcttcaaaaaacactaattctcataagtccacatattcagtaaatgggggattctggaagttacctgtgagtcgtgaatgaaaagaatgagaggcaagaggctcgaaggatgtgcaaaggacagcatgcaatgtgcagaaaaaaaaaaaaaaacggtattagaatgtggttccaccctggcttcgaggctccctccccagtcaaattctggcacttcccctaagtgctacattaggactgaattattttcatcaaagacagcaacctgcagattcacaacctcgtctatgccaagagtgttgttctcctatacaccctgaaaggtctcccatagagggtactccttatttgacttttgggaaagggaatctcatcaagccaataactgaggccagaatagacaattcagggatgcatacacttaacgtggccactttcttgcagcctccaccgagccaaggtacaggatccctctttcttgccctgtattcagattcccagtatgtggatgaaggtgggagcaattcctttcagttctcttgaacctcgggtcaagaaggagacctgtctacgtcccagctctttactccacattaggaaaaacttgctctgtctaaagctacacagtcttcctctgcttccactg

SEQ ID NO: 504 - DNA, 72754 bp, Homo sapiens
gaaaaatttaaacaatattatatactaaataattttgaaacaatattatacactaaataagatatatgtatgtgtatatatatatatatgcatatatgtatagttgacccttgaacaacacagtggtaagagtgccaagccttcatgcagtcaaatttgcatataacttttgatttccccaaaacctaactactaatagccaactgttaactggaagccttaccaataacataaacagtcaatcatcatgtatctgtatgatatatgtattataaaccatatccttacaacaaactaggttagagaaaacatcattaggaaaattaattaaaaaaagagaaaatggtttacaatactgtactatattttttgataccataagtttaccttgtctgtttacaagatgcaacttccgtctgaaatggtaggcaaccacagccgcagacctcaatctatgtcacgtatcagacaatttagctttttcttgtaatgtcgtgacttttctctggttcttgggatcacttccagcatcactagtggcacttcctatgggtctcacggtgttattcaaggttcgcggtattgtaccaaacatgatgaaaaatacacaagaactgcgagagattactttttactgtgatacacaatttactggagagacgagctgctaacgtagagatgattagagacacactgcatttaaagtggatactcacaacacgagctcaccgcagtagcaataggaggtggctatgaaattattacggtagtatagcatgtactatagtcaattttatacagttatgatttaatactgcatcattgcatccacttaacttgactgcaaatggcaacatgtaatgtctgtgtttgtgtttaataacacttaactttttacaatagatttgtacgtattttacagcagaaaatgataaaatagactaatatttaatatatcatgcattcatgacattccttacatttttaaatttttttatttttatttctgggctgtgtggttcatctatcagttgttttaaattactgcaaatattttaaaaattttaatatatttattgaaaaaaatctgtgtgtaagtagacctaggcagtttaaatccatgttgttcaaggagtaactgtatacacacacaaatattcatatataaccagggaatatataacatatgtattatcaatacatagtatataacattataacatctaatacacacagatatgcacgtatctcagcttttgtaaagttaaaaactatttgggagaaaatacatttgttttattctttaaaactaaacacatttttgatgtgtcaaagagttgaatatggaaataaaacctcaagatgatgaaaaaatatggaagaaaattttgaatatcaagatgaggaaagatttgtaagcatcaaaaaacaacaacaaaaacaacaaaaagaagtcacaacataaaaaatttaaatttctgttcattgaaaataataccataattcaaattaaaagcaagtattggagtgaaaacatatttttcaaattaacagcagaaagtgtttaagatatttaatatataaaagccttataaagtcacaagatatgtgttgtgtgtgaattatcaaatttattaaaatataaatgtaaaccaccaagtatatggaaaacttatttgccatcactagtaattcacacttataccttatgaaaacaagatattttcatttctcaaattgttacagtttattttattttattttattttattatactttaggttttagggtacatgtgcacaatgtgcaggtttgttatatatgtatacatgtgccatgttggtgtactgcacccattaactcgtcatttagcattaggtatatctcctaatgctagccctcccccctcgccccaccccacaacagtccctggagtgtgatgttccccttcctgtgtctatgtgttcttattgttcaattcccacctatgagtcagaacgtgcggtgtttggttttttgtccttgtgatagtttgctgagaatgatgatttccagtttcatccatgtccctacaaaggacatgaactcatcattttttatggctgcatagtattccatggtgtatatgtgccacattttcttaatccagtctatcattgttggacatttgggttggttccaagtctttgctattgttaatagtgctgcaataaacatacgtgtgcatgtgtctttatagcagcatgatttatagtcctttgggtatatacccagtaaagggatggctgggtcaaatggtatttctagttctagatccctgaggaatcaccacactgacttccacaatggttgaactagtttacagtcccaccaacagtgttatttttataattatcagtgtcagaatgagttgaaatgagcgtgttcaaacacagccagtggaattatgaattcatccatttttaaaaaaagcaaactgcattgaaagtcttaacagggttcctacatctactcaacttctgtttctttttcataaagaaatggagatggatacatttcagttcaagatgatatgttgcaaagtaacataaaatattaaaaagtaaaaacatccaagtattttgcaattattggatttttaaaataatgccacatctgtagaacaactatcaaaaccatacacttggagaacatttagcaacatgggttggagtgttttcaatataatgcagatgaaaaatctcaattatatccacttgttatgagttcaagataggctgggttaagttatagtaaaaaaaaatctcaaatttaatgacttaaacaaaattttatttatcattctcattacctgtataaagtgggtcaacaaagggtatctgctcatagtagtcacttgtggtccgagactcacagaggattcatctcaacaaacagatgtttccataatcaccatggcaggaggaaggaaacatgaggaatcactatctggttcttactacacttctgttcatatttcactgtttatatttcatggtcacatcttctttggagtgtatggagaaatccaataatattatgcatatatatctttgaagagctttgtgctcctcaaatttaaaaactatatttagaaaaaaatctttgatagtattgttctaatgctgtatggtgggtttataagtattaattttataattgtgctatatttatgttatgttatatatgtgagataacatatatatatatatctcacctatatcagatatcacatataaaaaataaagtaaaaatgggaaagtaatcacagcattaaatcaagaagatggggtgttaaaggcagccattctgtatactaaaactttctgagttattttataaaacataatttgaaaattaaagttatcagattataattcagtacttaactgtattaattcagtacttaactgaattgtttgaataaaactgaagaaaaaaggttttttttctcttgtataaagtaatggattcaatcaaaaaagaaatttatttgtctcttctttatttaacttaaacattgtgatctctgtgataaaattacataggatgtagagcttacagttcgattttcaaatgttaaaattcagatctttaaggtaactcctatcaatgcaacatgactaaaacacttgaaatcacatcctttattggataaaatggtatatatgtgtacatacatacatggataatcatacatccaaatgtgtgtattctatgcacccacatcaaccaaaatgcatgcactataatcagctaaaagataaataacactaaaatttcttctttctcaatagaaattatttattttcacaaacatgcttcccactggctgctaacaagtagagaatagggtttttttttgtttttaaaaaaaatgggtattgatttcattgacctgttctctagtcacacactaataattaataaagctgaagtcacttttttaaacagtgctattcagcctggtcttggtgtaactgcaaagatccactcagctcctttgttgtagtccatcttggccatagtttgtccttaactagctctctgtttcaagtaattaaatttttactttattttctgtaccacatgtcccactatcccattgtccctgagtcactcacttgactctctgcctaatatctcagtactctggatttgttatcccactttgctcttaattttttgcagaaacaaagatatagtccttggtcttcaaataccaaacctgaatctctagtattagttgctcgagccacataatattgattgtcattctacctgacctcactcattaatttatggatccattcaatcattcactcatttgacaaacatttacagatcacatataggccaggctctatgtgaggttttgaggacataataatagagaccaaccttgctcttctatagtagcaatggccatgaaatatataattatgataaaaatttaaagtactgtaataaaatataatccattattcttgtagatcaagaaggcagtgataaactctgattaaaaggattgtggaagatcttatgatagagctaacaatgcatctgggacttgaagaatgatttgaatttcacctcagcgtcatgaaaggaaagggcattccatggagtagaaataataacatttaaatgtgtggaaatataaaagctcttatgcatcaagatcctactgtagactgagatggagagagagcaatttttaaaaagggaaaaacaaaagctatgagaccaaatgacgagataaggtctgaattttttaagaagtgagaaaggtgattatttttaattaaactgttttacttgactttttcattttcttttggcaaactctgaaaaagaattattcatataagttcaggtttatgtgttattccaggagacttagattttttttaaaaaaatatgaaattcactgaaggagtttacaaagggagtaacatagtgattgatatatgttacttaagatcacattgacagccattcgatgtattagttaaaagcaagactaagcagagagcccaattagaagaatattacaatagttctgaaaaaaattagatcctgcatgaagctgagacagtggtaatagacaagataagtggttggggacaaattcaggaagtaaaaaggtaattgttctaatgggtggatttgttgggctatgtaagagagaatgggcaagggagacagcatgcttcatgactccccctaaggtcctagatttgataacaaaatggaattttggtgcaataatcatgagagaaaaatgtagaaggaggcagaggtcatcaaagtataaggtttgagcagagctaatgaagaattctgcacaggaaatggcggctaatgtatctgtagggcattgttttaggttatttcaaagcaatcgttactaatccattcacacggagcaaaggaaaaaaatgagccatattaacttctggactatttgaggggaggaagataaagaaagaaggaaaaagaaaagaaggtaccaattgctggttatctctctaatctcccagttattgcctcaagttggcataagttatctagtttctctttggggtcgatatggccagggtagactaggtttgagaaacaaataggtcattagcagaactgagagtgtaggctgaaggaaagcaagtaacctcactccagtgaagttccatcatctttttatcttttgtctaaatgactgttaagtctaattaactagcccagaccttccttctcagtaccagaacaatctatcgcaccatttaatttccatttattagaatgccatccatttatgatgatatgtccttgagacatgataaaagatcagctgtctccctgtgcatgaagaaatttctaagaaatattgttattatgtcaccttggggaaaagagaacttagggtcacataaaacattttggttttaatacgctgctttgagagaatgtgtactctttgagaaaattgaatataattgtgtactaatccacataaaaaattaagtatctaatgttagtcaaagtgagtctccataagcaaggcaaataaatctcactgataaaaaattctactacttagagtaggtcttaaaagaaaagaaatacatgaaaagtaaacctttttttctgtgttgtggtatgtggaagtaaaaaaaatccactgcttgaaaggtctacatgggaaacagtgtcctcaaggaaaaagttcatttcaattaatgttatacaatgaaagaaagattcacagaagtgtttaagaacagatggtcccaaatcaggtaatggggatagggttgtgaatattgcaacagagagggttggacggtctccaaggagcacatacaaatttctaggagtcccacctgactcctactagataattattactccaagtgagtctttgaatactcttttcctgctggtagttgggtggtcttactccaggtgcagggatttcctttgatttaaggaaatgtatgggtgaataacctagtatttcaaaatatcacttaggaaatttcatgaagctgactttcaatgatagcttgttgttcactaatacaaccacaactatgttaaataattctgtttttaaaatattttattgagatataattcacatactttttaaattatacaattcaatgatttttttggtataatgacagagttatgcaactatcacgacaattttagaacattttcatcatctcaaaaaaaattgtgtactcattagtagtcactctacatttcaccccagcccttgacatgtgctaatttgcttatctctatagatttttctgttttagacgtctcatataagtggaaccacataataaatagtcttgtgtgtctggtttcttgtacttaacattatgttttcttaaagtctgtctgcattgtagcatgtatcagcccttaattcattttttatggctaaataatgttccattatacagtgtattggttttcttgggctactataacagagtactacacaatgggtggcttaaaacaacagaaatttaacaattctatcctttgaaacatttttatactttgtacagcatgcctccctaacttaagttctctgactagacagaacacgatcccttgtcagttataacaatctactgtttatatggtttatttaaggataatcagacccatatgaatttatctgagatcccccagttgatacatgtaatgatgtagctttgttaactcaacaaaattgatttcagattccaggatgtaaagagtgttgacagtccactgggaaccaggtgacacaaaatataatgacagaatcagcaacagtagtgatcaggggctattccaagactacaagactgtaattattccattgtcactgaaaattgtgttttatatcacacttgatacaactgtcaataatgagtgagtaatagcatcctacatacatatttatggagccattttcctaagaatttcaactaagggaagcattattttcatcacctgtcaaaacaaaatagaacaattacaataagacattaaaatttttttatagtgataggcctaaaacatattcaagattcttggttttattcatctcacaaatatttagtgagtacttgttgtgtactgcacactgtgttaggctttgttagggaacaatactctcctccaagaactaacaacttagaaccgataaaagcattcaacttgaatatatctcaaaattctcctgctaccttgccagtcttgggtttatcatgctggctgtttagcttagttccgccttgcgtaatcaggccacatctgtgcagatgcagtaattaattcatatctgtggcctgccacaaggagacataaatattaatagagccttttatccataattttagagggtagcactttgggatttttgagcctaggaaagccataccagaaaaagagagcacaaggtcaggggtacaactggctggactagaaaatccatcaggtcagaataaaagaattaagaaacttatgtgtgttttagaatcaatcttctaaatgcccttcagaaaatccttctcaggacactactttatttaagcactgtattgatttcccccttatctttggtttaattccaaattattttatgcaactccaaagaccctgcttatttcatggggagggcctaactttacccctgagctagttttttttgctgttcaccctccctgaaacagtcttctctgtttcctcagttggataacttatcctatcttttaggtataaatgtcatcaacttcctctaataaatattccatgacaccctctccaccagggagtagattagacagctttttattcttttgcaaaagaatcctgtattttccctactctaaaatcatgctgtagtatgactgtctgcttatttttctgtaataaaggggttcatatactttattggccaaacaagtctattttgagattaaaaagagtattaaaataactataatcttatacaagtttaaaataagtatttactaacaagtggggtttgggcctatggaagtgttataaaatatttttgaaataaaatgtttctttaagaaagcaatatctatttctattcataaaagcaaaagaatatttgtattgattatcagcacattaaataacaagtagtatgattatttatgttatatattcatttaatttaaacaccatcttagttgtacaagtaatattggtcattattattctatttgtggacaatgtatttttgaaatacagttttattgttttccattttttcataaaattgcctgcatttgttttcaaagctgtgctttatgctaataaatttgaaattgttgaaaccttcaattgactggtctccatagaatacattacttttaactgagaaaataccctctctacatgcactgaagtacctagtaatcgcaaattattttttgctaaatacagcatattctcagataatggaaatatattgtatatttcaaaaaaagctagaggaaaataatttgcatgtcctcaccacaaaaaactgataaatatttgaggtgatgaaattctaatgactctgatttgatgattacacaatctctccatgtattgaaacgaacaatgttccccatacatatgtataatcattatgtatcacagctttttcttttaatattaaaatgtatacatattttagtcccactgttgttgttgttttttttttttttttttttttttttttttttgaggcagtgtctcgctctgtcacccaggctggagtgcagtggtgcgatctcagctcactgaaagtgtcgcctcctgggttcacgccattctcctgtctcagcctcccgagtagctgggactacaggcgccgccaatgcgcccggctaattttttgtatttttttttttttgagttgagacagggtttaaccgtggtctcgatctcctggcctcgtgatccgcccgcctcggcctcccaaagtgctgggattacaggcatgagccaccgcgcctggcctatttttttttttaaatgtattttattgtatatatttgaggtttacaacataatgttatggagtacatatagatacatcgtaggaaatataatggttctagagtgaagcagattagtatatctatcatctcacataacttgttttttgatgtgacaacagcagataaaatctacttaacaaatatccttaacacaattcaattttatttagtcttcatgttgtacattagatctttagatttgttcatcctacctatctgctattgtacatcttttgacctacatcttcctcatttcctctctccctctcccaccaatggtaaccactgtttccttctttatctctgtgtatttgagctcttttattattttatatttaatatataattgaaatcatgcaatatttttttctctgtgttgcttatttcacttagcatagggtcctcctggttcatgcatgttttgacaaatggtaggatctcctttttaaggctgtgtaatatttcattgtgtatatataccacattttctttatacctccatcaatgggcatttaggttctttccatatcttgactgctgcaaataatgctgcaatgaacatgggaatgccaatctttacaaggtggtgataatctccttttggtatattggtatatattcagaagaaggatttctgagtcatatggcagttatatttttagtatctctaagaccctacatatttcttcccataatggctagatcagtctatattcccatcaacagtgcactgcggttaccttttcttcacacctttgccaacattttcatcttatccatttgataatagccttccttactggtgtaaggtgatatctcatagtggttttaatttgcatttccattatgattagtgatgttgagctccttttcatatacctagtgtccatttttatgttttctttgaaggtctgctcatatcatttgtccatgttttaattgggttgtttttctgctattgaattatgtgggtttttaaaataaattttggatattagccattatcagatgtatgatttgcaaaaattttcttccagtctgtagcctgcattttcatttttaaattgttttctttgctgtgtagaaggtttttagtgtgatgtattcccattggtttattttttcttttttttattatactttaagttctagggtacatgtgcacaatgtgcaggtttgttacatatgtatacatgtgccatgttggtgtgctgcacccattaactcgtcatttacattaggtatatctcctaatgctatccctacccctcccccaaccccatgacagggcccagtgtgtgatgtgatttattttttcttttgtagcctgagcttttggtatggcatcccaaaaaaattattgccaagaccaatgttgtggagtttttcccctatgttccatgagttctatggcttcaggtcttacacttaggtattttgtccatttttagatgatttttatccatagtgcaagataagggtccaatttagttcaaatatcttaaaagagctcttgtttttgcttccattcagagtacttgtctttggtagatttttttatcagacaaaagtcattgcagatgtctcaatttatgactatggagatcatgcaaattttttttttgtaaattttatcctttttggtatatattgcaagtttatccaattaaaaataggagatttatcagactacatctcacaagtttaaatattctggagtccaataatataatttaaaaattaaatgttttacatagtttgtgcctttattatttaattggctccatttctacaaggatcagtttcaatgtcctcctctttacaacctttgcttttaagaattggaaattgataaagcttcacaagctaaagctttttggcatcacaattgctaaatacttttatttaagttcagtttcatagtacttcttcaagtgctcaaacacatctaaatctaattgttgatgaccagcacagagaaaaactgcatagccaccagcataatttagaatatgtttgtactgaaagccagcttcatctcaaaaatgcactacttttgttaccccaacaactagcgtctctatttcaattagtaattatgaataattaataatattatacatattatatataatagaaataataattagtaatatttgtaattagtaattatgaacaatcatgtgcacgacgaattccaagaacatttctattcagaaaagttcaaaaaagttttttaacttagtaagattattgtttccattctgcatgctttgtttactgaaacatgataaaaaagttaatcaaatttttttattcataccataacagcaaaaataataattttatctttaatgttaaactttaaactactttacaatataattcacagtaatgcaagatactcaacaaaatgaactttgtaaagtgttatttcatgtttatgactttaatgaaaacacaatctattagtggaattaacttattttctatttgaagcatcatttaaccgctagttcatcggctaatggaagtaacatataaacagttgttgttttataccttatacatgcaaaagatttcttaaaaccaacaaagagtaaattactttagaagagcaatcatttaatctaaatgaaaagtcagtctttaaaaagaaatacgtaggccaggcactgtggctcatgcctgtaatcccagcactttgggaggccaaggtgggcagatcgcttgaggtcaggagttcaagaccagcctggccaatatggtgaaacacagtctctactaaaaatacaaaaattagctgggcatggtggcaggtgcctataatctcaggtactcaggaggctgaggtgggagaatcgctggaacctaggaggtggaggttgcagtaagccaaggtcaccccactacactacagcctgggtgacagagcgagacttcatctcaaaaaaaaaaaagaaaagaaagaaatatgtaaatacaccatctgaagttgcacatgttaaattatcatcttgtgcataatctttctaaataactgtaggtgctagtgatttgggggatgatatacatcaccttgtttccacaggttcaatgatatcactacagactcaattgttatagtaaatgtcaacaaatactttgtgtaatttacacattcatcaactttcttgagaaatcgaagtatctttaaattttcattaaatatgcatttttcaaggaaaaagacatcgttttggaaaggatagtggttgaattaaatatagtaaataatgaactactttctatatattccatggtaagactattcagtctctatttctcacacatctcatacacaaccatggtacaaattagttggttcaccaaatgacctagaagcaatagcttccaatatttctcccaccaccaccaggatccacaagaagttggttatctccaggtcactcatattaaagaattagtttttataacagcattattgagatataatttgcatatcataaaagtatcccatttaaaatgtataattcaatggtttgtagcatactcagagttatgcaaccatcacatcactattgtaattttataatgttgttatcatcccaaaaaacccatattcattacaagtcattctccatcccttcccccatcccagctctaggaaatccctgatctatttctacttatagtttcctattatggacatttcatataaatctaattacataatatgtcaccttttgtgactggcttattttattttgcataatattttcaaggttcatacatttcacaccatgtaacagtactttgtttatattgttaaataatattccactgtgtgggtatgccatattaagttggtttattagagagtatgatgaacactattcttttcaatgcatcagaaaaggatgggagaaagggaagcaatttactgctgattatttctgagattcaaccacatgttaatctgaaaactctgttcattgcatgcatctcacacattactaattaagatggtgctgaaagtaaaaagtgaaattctatcaaaaccattccagtcaaaagaaacattagtaaaaatatttctttaaaatatgaaaactcaagaaaaaaatcctacgccatatgggatactgagaccacacatgtaagccaggcttatagcaggattatggttgccctatctgtttctcatactggaacattatattttttatgagaatagtagattagcataattcttgccatgtaatagcctctcaatatgaatttttgaatgagttattgaagatgttttcccaataagtatgtttatttcagttttgtgaatttttaaatatttttaaatttgtaagtattatggatacataatagttgtacatatttatagtgtacatgtgatgttttgataaaagcatacaatgtgtgtaatgatcaaatcagggtaattgggatttctattacctcaaacatttaccatttctgtgtattaggaacattacaattccacttaagttattttgaaatacacaataaattattgttaactatagcctccttattgtgccactaaacactagatattatttattctatctaagtatagttttgtacccactaaccatccctcttaatctcccccaccccactacacttctcaacctctggtaaccaccattctactctctacctccatgagatcaatttttctcttttttacctcccacagatgaatgagaacatgtgatacttgtctttctgagtctggctcatttcacttaatataatgtcttccagtttcatccatgttgctgcaaatgacagaatttcattcttttatgactgaataatattcccttgtgtatataccacattttctttatctgttcatccattcatggatacctaagttgtttccataccttagctactgtgaataatgctgcaataaacatgggaaagcagatgtcttttcacatggtgatgttctttctattagatgtataccaagcagtggtattactggatcatataatagtactatttttcatttttttgaggaactgccattgttcctcatagtggctacactaatttacattttcaccaacagtatatgaggactcccctttttcccatatccttgccagtatccattattgcctgtctttttaatacaaagccattttaactgggatgagatgatatcttattgtagctttcattttcatttcctgatgattaatgatgttgagtgttttttcatatacctgttgtccatctgcatgtcttctcttagaaatgactatacagttttttttctcatttttaaattggattatttatttatttttccaattgagttgtttgagctccttatacattcaggttattaatctcttgtcagatggatagtttgcaaatattttctcccattctgtgggttgtctcttcactttgttgattgctttattggctatgcagatgctttttaacttgttgtgaccacatttgttcatctttgcttggttgtctgtgcttttgaggtcttaactaaagaaatatttgcccagaccagtttcttggagtgtttcctcaatgttttcttctcgtagttttatagtttcaggtcttagatttaagatttaaatctttaaaccattttgatttgatttttgtatatggggagagatggggtctagttttattcttctgtgtatgaataccctattttcctggattgaagagactgacatttccaaatatatgttattagtaaatttaattgtttgtaaatgtgtgaatatatttctgggttctctattctgttccattggtctatgtgtctgttttttatgccagtgccaagctgttttggttactatagctttgtaatataatttgaagtcaggcaatgtgatacctccagctttgttcattttgcttgggatagctttggctattctgagtattttgtgtttctatacaaattttagaattattttttatatctgtgaaaaatataattggtattttgataggaatttcatttgaatctatagattgctttgagtattatggatattttagtaatgctgattcttcaaatcatgaatatggaatatctttcaagtttttgtgtcctcttcaatttcttttattattattattatactttaagttttgggatacatgtgcagaacatgcaggtttgttacataagtatacatgtgccatggtggttggctgcacccatcaacccgtcatctacattaggcatttctcctaatgctatccctcccctagccccctaccctgtgacaggctctggttaatgatgttcctttccctgggttcatgtgttctcattgtttaactctcacttatgagtgagaatatgcagtgtttggttttctgttcctgtgttagtttgctgagaatgatggtttccagatcatccatgtccttgcaaaggacatgaactcatcctttttttatggctccgttgtattatatggtgtatatgtgccacattttctttatccagtttaacattgatgggcatgtgggttggttccaagtctttgctattgtgactagtgctgcaataaacatacacgtgcatgtgtctttatagtagaatgatttataatcctttgggtatatacccagtaatgggattgctgggccaaatggtatttctggctctagatccttgaggaatcaccacactgtcttccacaatggttgaactaatttacacttccaccaatggtgtaaaagcattcctatttctccacatcctttccagcgtctgttgtttccttactttttaatgattgccattctacctggcatgagatagtatctccttgtgggtttgatttgcatttctctaatgaccagtgatgatgagctttttttcacatgtttgttggctgcataaatttcttcttttgagaagtgtctgttcatatccttcatccactttttgatgaggttgtttgtttttttcttgtaaatttgtttaagttccttgtacattctggtgattagccctttgtcatacgtatagattgcaaaaattctcccattgtgtaggttggctgttcactctgatgatagtttcttttgctgtgcagaatccctttagtttaattagatcccatttgtcaattttggcttttattgccatcgcttttggtgttttagtcgtgaagtctttgcccatgcctatgtcctgaatgatattgcctaagttctggccagggcaatcaggcaagataaataaataaagggtattcaaataggaagagaggaagtcaaattgtctctgtttgcagatgacatgattgtgtgtttagaaaaccccatcatctcagcccaaaatctccttaagctgataaccaacttcagcaaagtctcaggatacaaaatcaatgtgcaaaaatcacaagcattcctatacaccaacaataggcaaacagagagccaaatgatgagcgaactcccattcacaattcctacaaagagaataaaattcctaggaatacaacttgcaagggatgtgaaggacttcttcaaggaaaactacaaatcactgctcaaggacataagagaggacacaaacaaatggaaaaatattccatgcttatagatggggaaaatcaatatcgtgaaaatggccatactgcacaaagtaatttatagattcagtgctatccccatcaagctaccattgactttcatcacagaattagaaaaaactactttaaatttcatatggaaccaaaaaagagcccatatagccaagacaatcctatgcaaaaagaacaaagctggaggcatcatactacctgacttcaaactttactacaaggctacagtaaccaaaactggttactgataccaaaacagatatatagaccaatggaacagaacaaaagcctcagaaaaatgccacacgtctacaaccatctgagctttgataaacctgacgaaaacaagcaatggggaaaggattccctgtttaataaatagtgttgggaaaactggctagccatatgcagaaaactgaaactggaccccttccttaccccgtatacaaaaattaactcaagatggattaaagacttaaacgtaagacctaaaaccataaaaaccctagaagaaaacctaggcaatttctttaattaatgttttatagctttctttgtagtgatctttcacttctttagtcaagtttatttctaggcattttattttatttgtaactattgtaaataagattaatttcttggtttcactgctggcatatagaaatgctagttttctttaacattgattttatattctgcaactttagtgaatttatcagttctagtcacctttcgttggattctttaggtttttctaaatataagatcatatcatctgaaaataaggataatttgtccttttcctatccaatgatctttacttctttctcttgttcaactgctcctcctaaaacttccagctgtatgctgaataacagtggtgaaaatggacattattgtcatggtcaagatcttagagaaaaggttttcagtttttccctgttcagtatgatactagctgtgggtttggtgaatgtgttttttttttatcatgttgaggtatgttccttttatacccatttttttagagtttttattataaagtgatgtgaaattttatcaaatgcttaattgacattgattaaaatgatcatatggttttggtctttcattctgttgatgtgatgtatcacgtttttgatttctatatgttgatccatccttgtgtcattttgataaatcccattttatcataatgaatgacctttttaatgtgttgctggcttcagcttcctaatattttgttggggattttaacaattatgttcatctgagatattgacctatagttttcatttttcttgtgtatctggctggtttcagtatcaggataatactggtctcatagaattagtttggaagaattcccttttcattgatttttttggaatggctgtaatagaaatggtattagatatttaaaagtttggtagaattcagcagtgaagccatcaggtcctgggtttttctttgatggaagacattttattcctacttctatttacttgttattagtctattcaggttttgaacttcaatcttggtagggtgtatgggactaggaacttattaatttactctaggttttccaatttattgacatacaatttctcataacagtctctaatgatcctttgaatatttgtggtaacagttgtaatatctctattttcatctctgattttatatttaggtcttctctcctaagataactttgccatgataaggtgatggagctttatctgaaagtcactagcacaagcaatgaaatgactccatcccataatttatgccttatacaaatgttaatttcatatttatttctttgaattataatttataagaatataatattatacataaattaagataacacctacttttatacattatattttttgtaagtgaatttgatttaaatgtattatttcatttaatctcacattatcggttttacagagaggtggttatctcttccctgtcacaggttggcttccctaggaagctgactctgaaatggagattagcatacaggatgtttatcagggagtattatgggcataaacacatggaaaaagaggaagcaaaattggacaaagggagaattatagtcttgatgaaggatacagttgatcttagggaagttctaaaattgacatgaccctttagaattgtctcaagttgtgggagaaaggcagacttcatatctttccttgatgagtcattgggtatgggctgcccaaggaagggggcaaaatattgggcaaggggtgtgtctccaacaaagacattttctgtagaaggctaatagcggagacctgccttagggaagtacttatagaagtttaaaaaacaagccctttatttctacaagggatctgggcagcacactatctatgacaaacacattccattaattccttagtttttgataaagtttagaaatatttttggaatatttttatttctgtcagttaaaagagaaccaaccttgtaactaagactgacttaaattttaccttggtccctggctagttgtgtaatttggaataaactcagtaattattctgatacccattttttcttatataaagtgaaggagactatatttgatatataacaaaattctaatatttataagtaaaattgtgtggggtgtgtgggggggtggagagagagagagagacagagagagagagaggaagggagatgagccctattcagttaaaatgaagaaaagtaactatatcaactcacaacagattagcaaatggtggccctgtatcatattctacaaagtaagggcagattgtcagaggcactgagttagttttacactgctacataataagccaccagacttcatggttcaaaacaagctacatccatttattagctcagagttcagtagttcagaagtccagccacgtttcagctgggttctctggtcaaagtcttacaagactgaaatcaaggtgtcagtcagactggagtctcatttggaatgtgaagtcttttttcaaacttatttaagttgttgacagaatttagttcattgtagttttaggactgagacactcagaccctaatgatgattcaccttcacggaaattcaaaatatggctatttgctttcttgtttgaggccatagggagaatgtctctctgattctttgcattttaaaactctagacccccatttgatacctcacctgagtaggacagactctgattagataatttccgatctgattaacttaactgaatgtggaactttaattatatctgctaaagtctctattgcatataatagaacataatgatgaggttgataatgcatcatatttacaggcttcacccgtactcaaaagcagtgcattatacacaatggggtagaaatctcaaggattgtcttggaattctgcttgccatgggcacacagaaaatctcagcgataaagaggctgttggaggtagagaggttggtccacttgttctgtcatgtaataactcttagatacaggaaagaccttgtaattaaacattttccatctgagattaacacagaaatccctaaccaataattcaacttgacaagaacagattagatatttttcctgtgctgagtatggatgtagagttgtgaaatggaagacaagggaaatttagaaagatgtggagattcaaagtgttcaaccttgttgcatttgccacaatatttacatcctatttcttgggattatattatttccccagcagtggtttcttcttactttgagacataactgaattgagtatctcgtttgcactgcaactgcaattttgacagtccagtcttgatattggtcctcagtttatctgctctgccactttaggagataagggattggttcaaagttaccaccaaggctttctcgtttttgatttatattctgagttggaatttcacagcctttagttcctctttttcgtgtgtaaactacgtaggacatctagtaaaaggtaatgtatatacaatattaatgatcactattgtttttcaacacctaaactacccacaaaatttgtggttgattatgttccctgttacaggctgttgcgggaccagccactgccagggtcacttctgttcttgtgttcagctccagtcacccgcaccagtgacctcttctctgaaggtgagtgcctctttggagtcattgatatcatttcttaccaaagaacctgatccagcccacttcaattcaacagaaatatttgtataagaggaaagatcaagtttggtgttcttttcctcccaagataaatcctagtccctgtgtaaatcgctaacttcttcgcacagggacggctccttacaccaagtggtattgccatcttttcaggccacagaagctgctgtttcaacctggtctggagtaatgagtttcatagtggcttgaacaaagaaaatcacttaagtgattaaataaaaatttcaaaatttagtcctaaggtgatttgcaactctctcttcacacacagaagatattgatataatgtcctaaatgttccttcttcaggcatctatcttacacacaaatatgagcatattctatctattttgcacccttctttacttcacattatattcaattataatatttttcaatgactttgtaaaatataataataaatttaaatggccaaataacatataaaatcctttcaaattatatttaacaatttcatgtctaactgttatcattgaaatgttggtatagtaattttactattgatatttaacttgatcatgttgcagtctcttaaattaaacacactgatatatggagatttggaggatttttttaagtactaaaaaaggaaaatttatataacagaggagaagctgcaaactcatgggccacttatatcccattttctaataaagtaggagttttttatgtgacattgtgatggacttattgttgacatgggtaagttacagtcacaagttattcaataaatactaatttaggtgttactgtgacggtaatttatagagttaaataaagtcaatactcagttgactttaagagacattatcctagataatttagcagagcctcatttcaccagttggaaagccttaaaagcaaagctgaagcttctctgaggcaggagaaattcaacttgtggccagaatctgcagcccataaccaagagttccagcctgccgtatggattttagactagccttatcagtccccacaatcatataaaccaatttcttgaaaaaaaatcttacaatatctctcctactggtctgtttccctggataaatgatgatggatacagatgttgcttcttgacattgttctaaaggaacataatcatatggatgagttttctgaattgtttctggggtttgagaatttagttgcctcatgtgattatatttaaaggcactaatgactatttccggtgatagagcattagaaatccatggtataatatgacaaaagagatatggaaaatataaccattggacacttgtgatcaaatacctgtagaagttgaagttgtgggtcaccatgtatttgctaccttagaatatttttatcaaacctaagagtatcgtggagctggtcagttactcctcactgttccagaaataaaagaagtgcaggacttcaaattccagctcaagttccacctaaataatgtaatagtctgttttttatgccctaaaagtcaccgttatcttttctacctacaggtctgagatttctaaaaattaaacctgaatctccctgtgagtggcttaattacaacacaaattgaatttccaaccccacgaggtgttttctgttaaaatgattgggaaggaatgggatcctgaaaattggaatgagggcatattgacagatcccaatgaagctggggacactgaacccttgaatttggacagttttcttgctgggagaagcagccatccacccctgtctaaggaggttatctgttcttcctgaagaatctataattgccttgcaaggtactgctgattcttcttaggacctatctccacccacccctctctgcatctagacctacaattagacttaagtctcagcagagcccaaacggtaaggtacaatgaatgacctgcaagaagaacagaatgatttttccaatttatacacacataaatctggggaaataggtgtgggaatgggtcttaagagtgtggcattatggtggaaggaatataaagttggattagtctgatgtattactatggctcactaaggtcagtggtctaggaagggctctaacagtttgttttgtccataggttgaaacatgaaactgaaggtggcctacaataaatgaagttgaaatgtcaggattgccttggtatactatggaggaaggcatctaaagtcttagggaggttgaaatgtttgaatagatttatcatgtaagaactgctcatccaattggagagtccagaagacataccttttaccacaattatgagaaataaatttatagggggaatcctagcatccttgagagctctctctttactcttttctgcaagtcagatattacagtggaaactgctgctatttgacagggatcatcaaaaaccagatagtcaccacaataaactgcagagtcaaagcagttaccagaatactgtaactcccaaagacctacggcattagctagttgataatgatgtcactagaaaagaaatagatgggcagtctaatgaatgatgtgtataggtggaaaagttccaggtctagtgagcagaagtctaattcaaatcaccaaaacagagagacataacacctcaattaatttccaggctgagacaatttaccaccccagaaccccttaaatgaaagggaggctaagtccctttgaggaagaactccattgcactgccaaaaaaaatgtgtttatactgttaatctttcttctggtctttcctaaagagatctagttatttaccagtgtgcttttgctttggaaaatagaaataattagacttttggaagattactgaacactgactaaaatgacactaatttctggtcacccaaaatgtcactgtggaggcataatagaggcttatgaaggtttggtgattaattgatcattagttcatatttgtctcagtgggttcagcatgtccctgaacaagtcctgtgattatttctccagttccagaagcattattggaatagacacattcagaatgtgacaaaatctctacattggtttcccgacttgtgaaataagggatattatggaaagaaaaataattggaagccactataactgcctctacctaggaaaatagtaaactaaaagtaatgctgcaatcccggaggacgtaaaacatgtgagcatagtgacttcccaccacatccacattcaattcatctatttggcctgtgcacaaaacagatggatcttggagaatgacagtggattattgtcaacttaatcaggtggtgattctaattatagctgctgttccagaggtggtttcatcgcttgggcaaattaacacatcctcaggtatttggtatacagctattcacctgaaaaaaaaatgacttttttgttttgctatatatgttagtaaagatcattagaagcagttttctttcagttggaaaaaccagaaatacacctttactgttctacttacaggatgcgtccattcttcagccttatatcatcatttagtccactgggaccttgattgatttccctttctgcagaaaatcagtccgttccattgcattgatgacattatgctgattggacctggtaaccagaaagtagcaactgctctggacacttgtgtttcagagggtgggaaatatatttcgcaaaaattgagaggccttccgtatcaactaattcccagggtctaatggtgaaaggaaggtcaaagtattccttctcaggtgaaaaataagatttttgtatctgattggtcctcctacagccaaaaaagaagcacaatgcataggaggcctctttagattttcaaggcagcacattgttctttttgtgtgtactactccagcccatttactgaaagacctgaaaagctactagttttgagtagaagcaagatcaagaaagggctctgcatcaggtctagcctgctgtgcaagctgttctgacatttgggccatgtgtcaccagcaagccatgatccggaagatctgatgacatttaaaatgtcagtgtcagagagagatgctttttggagtctttggaagcctcttataagtgaatcataacacagactcaggattttagagtaaaactctgctattttctgcagatatgtacagtaagtcctcacttgacctgatctatagattctcaaaaactgcaccttcaagcaatacgcatgtttctggtcacagaaacatcacccaacttttaaataaagatgaaaacgcttctaatattaaatattaaaataaatatgggctatacacatatttaagaaaggttaatgaaaacaagtaagataattgtttacccaattattccagttcagggtcacaagtggctggagcctatctcagcagctcagggtgcaacccgggcaggaccccatccatcacagagtgcactcacacacacccacactcactccagtggggatgatttaaacactccacttcacctaacatgcacaactttgggaagtgagagaagacaggagtccctgaagaaaacccacacagacatggggagactgtgcaaactccacacagacagtagcctgaaagggaattgatttttttttcttatcaacattataacaaaatgacattatttgaggagaggtgtatactatttttgagaaacagtttttggcttggtcccaggtcttaatagggaccgaatatattatcatggaccaccaagttataatgtgatctgagctatctatcatgaactggttgctgtctaatctactaagcatggaagttaggcatgcacagcagcactgtgccagtcaatggaagtggtatatgtgaggcttgaggtggctttccgggcaatggtaagttacataaggaagtaacacaaatgcccacggccctactcctgctacattatcttctcaatctcagcccacaccaatggcctcattgggagtttcttatcagttaactgagaaagtgaaaactcagacctggtttacagatagttctgcacaacatgcagcaccagccaaaagtagaaaactccatcactctagctcttttctgggacatttttgaaggacagtggtgaggaaaagttctttcagtgggcagaacttagagcagttcacctcattgttcactttccattgaaggagaaatggtcagatatatgactctgtattattcaatggggtgaggctaatggtttggatggatggttaggaacttggaagaaacataattggaaaaattggtgacaaagaagtcttggaaagcagtatgtatatagatctcacaaaatgaataaagtgggtgaacatgttggcatctcttatgaatcttcaacaaaggattacgtcaacagagaatgattttaataatcaagtggataggaaaaaatgtctggatgccagtcatctctttcttcagacactccagccactaacgagctctgaacaaattggctatgatgtcaggaatggagatgatgcatgggctcagaaacatgaaattatactcactggggctttcctgacctaagtctatactctgccagcagcaaagaccaacactgagtcctcataatagaaccatgccccaagataacagccaactacctgatggttgcttgattacagagaactgctttcatcatagaagatacattgttcttactagagtagacacttcttctgaacatggacttgctttccttgcatacaatatttctgccaaaattagcacctgtcgacttagagaatatcttatccaccatcacagtattatacacagctctggtcaaggaacttactttgtagtgattaaatgtggcaatgatctcatgctcatggaatccactagcctgttacaaattgtcttgaagtagctgactttatagaatgttggacagtcttttgaagactcagttacactttcagctaaatggaaatacctagcaggagtcaggataggagcactttcctctaggatgtgttaatgctctacatcaccatccattatatggtgctgttttccctacagccagggtttatttgtccaggaattaaggagtggaaatgggagtaactctatgcattattacccttaatgatctctcagatatatttttgcattatgtctcctcaactgtagcctatgatggtctacagatctttgttccaaaaggagaaatacttccaccaggagacagaacaatgattgcagcaaaatggatgttgaggctactacctacccattttgggttccttgtccttcctaatcaatatacaaagaggaagttaatctattgtctgggataatagattctgattattaaggggatgctgggtcgctactacacatggcgggaaataagattttttaaatgtaagaaattctttatgatgtctcccacatcctatagctaaaacctgtattagtccattctcacgttgctaataagtacatacccaaatctgagtaatttataaaggaaagaagtttaattgactcacagtttagcatgactggggagacctcaggaaacttgcaatcatggcagaaggggaagcaaacacatccttccttacattgcgacagcaaggaaaagtgcagagcgaagttggagaaaagcaccttaaaaatccatcatatctcatgagaactcacccactattatgagaacagcatggaggtaaccgcccccatgatccacttacctcccaccaggttcctcctataacacctgaggattatgggaactacagttcaagatgagatttggctggcaacatagccaaaccatatcattccaccctagcccctcacaaaactcatgtcctcaaaattcaaaacacaatcatgtccctccaacagtcctcccaggtattaactcattctagcatgaactcaaaagtccaagtccaaagtcacatctgagacaagacaagtgccttttctcaggtccctaggagcctgtaaaatcaaaagcaatttagctatataatggggacaggcattgagaaaatacacccattccaaatgggagaaactgaccaaaacaaagggggttcaggacctatgccagtctgaaattcaacggggcagtcattaaactgcaaagttccaaaatgatctcctttgactccctgtctcacatccaggttagactgatgcaagagatgggctcccacaatcttgggcagctctgcccctgtggctttgcagggtacagccccactcttgggttttttcatggctggcattgagtgtctgtggcttttccaggtgcatggtgcaagctgtctgtggatctaccattctgggttctggagaatggtgacccttttcttacagccacactaggcagtgcccaagtggggactctgtgtggtggctcccacctcacatttcccttctgcactgacctagcaggggttctccaggaggactccacccctgcaccaaacttctccctggacatccaggcatttccatgcatcctctgaaatctaagcgaaagttcccaaacctcaattcttgtcttatgtgcctctgcaggaccaacaccaacgccaagacccaacccaagagttgggtcttgcaccctctgaagcaacgacctgagctataccttggcctcttttagtcaccgctggagcagctgggacacagggctcaggaaacttacaatcatggcagaaggggaagcaaacacatcctttttcacatggcagcagcaaggataagtgcagagcaaagtgggggaaaattcccttataaaaccacctggcgcggtggctcatgcctgtaatcccaacactttgggaggctgaggtgggcagatcatgaggtcaggagatcgaggccatcctggctaacatggtgaaaccctgtctctactaaaaatacaaaaaattaaccgggtgtggtggcaggtgcttgtagtcccggcttctcgggaggctgagacaggagaatggtgtgaaccctgggaggtggagattgcagtgagccgagatggcaccactgcactccagcctgggcaacagagcgagactccacctaaaaaaaaaaaaaaaaaaaaaaaaaaaaaaaaaatcagattttgtgagaactcactcactatcacaaaaataacatagaggtaaccacctccatgattcaattacctcccaccaggtaccttcaatgacgtgaggattatggaaactacagtacaagatgagatttgggtaggaacagagccaaaccatgtcaaatcaatggatacccacaacccaatccaggcagaactgctagtggacgaatgcttcaggcatgaaagtttggttcaattcaccaggcaaagaaccatgactagcagcactgcttgctgagggcaaagggaatatcaaaagagtacaggaagaaagtagttataaataccagctacaagagcatgaccagttacagaaacaaggattgtaagagttatacgtattccttccttattttattttgaatatgtttgcatatcttattaaccattttttaaaagtttcttccctgtcttattcccttaaatggctgttaactttattttgcagtaagttacaggatatcaaaggaggagagtgaacatcatccaaggatttggagtcctcttctgggaaaaaggtaagtatatgttcttttgtggaaaaaaaaaaaaaagcaggctgggcacggtggatcatgcctgtaatcccagcactttgggaggcccaggcgggcagatcacctgatgtcaggagtttgagaccagcctggccaacacggtaaaaccccatctctactaaaaataaaaaaagttacctgggtgtagtggcaggcacctgtaatatcagctactcaggagactgaggcaggagaatcacttgaacctgggaagtggaggttgcagtgagccaagattgcgccattgcactctagcctgggtgacaagagtgagacttcgtttcaaaaaaaaaaaaaaaaccaaaaaacaaacaaacaaaaccaaaccaaaacaaaacaagacagttgtgttattttgggtggatgcatgactttgttactcactttatttagagtttgactttaggaatgttaatgggtgccagactgacaggtggactatggtggtggttttactgtgtcaacctggccaggcctcatcctctagttattcaagtaccaatctagatgttgctatgaagctattttgtagatgtaattaaatcctaaaatcagttgacttttagtaaagggggttttactagataatctggtgggtactgatttaattagttgaaaggctttaaaagcagagctgaggcattcctgagaataaacttatgcttgtggaccacagcttccacctatgcccaatagtcccattcttcccttactgatgactcaccttatggattttggaactttctaggcattccccataagctaatttcttgtaacaaatttctcagtatgtatctcctaatggttctgctttatctggtgaactagactgtattagtccattttcacactgctgataaagatatacccaagactgggaaatttacaaaagaaagaggtttaatagacttaagagtttcacgtggctagggaggcctcacaaccatagtggaaggtgaaaggcacttcttacacggcagcagcaagggagataacgtgcagggaaactctcattttaaaaccatcagatctcatgagactcattcactatcatgagcacagtgcaagaaagacctgcccccataatttaatcacctcccactgagttcctcccatgacacgtgggaattgtgggagttacaattcaagatgagatttgggtggggacacagccaaaccatattataaactagtgtagacagatatcacctgtctgagactactgaacctgaattggtgatgagaaaaactcaaaaaaagagaaaatatttattaacaacatattcctctttaaatgtttggtagaattcaccactgaagccatctggtcttgagcgtctttttgttgggagatgtttgattaccgaaaaaatatccttactcattatggatctgttcagattctctgtttattcatggtgcagtcttagtagcttgtatatttctagaaatatatgcatttactttaggttatccaatttgtttgtatttgattgctcataatagtctgttatgatcatttgtatttctatagtatcatttgcattctattttatttataatttttcttgagtcttctttttttcttagcccagctaaggatttgtcaactttgtttatcttctcaaaaaaccaacccttctgttttattgatcttttctattgtttttctgaaaatgcaaacccaaaccacaatgaaatatcacttcatgcctgttagaatggctattactagtaaaaaaacaacaacaacaacaacaaaaaataaccagtgttggagagaatgtgaagaaaagggaatccttgtatactgttgatgggaatggaaattggagtagcaattatggaaaacagtatggagattcctcagtaaattaaaaatagaactactgtacaatccagcagcccctcttctgggtatatatccaaataaattgaaattaggaccttgaaaagacatctgcaagcccgtgcccattgcaacattattcacaataggcaagatagagcaacaacctaaatgttcataggtagattaatggaaaaataaactgtggtatatacatacaatgaaatattaccctgcctttaaaaaaagaaaatcatgtcatttgagacaacatggatggacttggagggtattctgttaaatgaagtcatccagacacaaaataaacagatactctacaatttcacttatgtgtggaatctaaaacaaactcttagagggatagagtagaatggggcttgccagggtctaggaaaatgggagaattggggaggtggtagttaaagggtacaaagttccagttatatgtaagagaagtaatttctggaaatctactatacagtgtagtgcctatagctagcaaaactccattttatacttaaaatttgctgagagggtaagatctaccttatgttaattgtccatatcgaaaaacagtgacaacaacaacaaaaatcccaataatgataataaaggagctgggaggaaactttgggagatgacaggtgtactatggccttggtagtggtgatgatttcatgggtttatacttatctccaaagtcactgtgagattgtatataaaataggtacagtttttaaacatgtcaatcatacctgaataaagtggtttaaagacaaaaacaatatattcttcataagcagttccacttactgtattttttttctaatatgagagcaattctccagaaacttcagctgtgggaaaataagaaaatcactgccaaagatttggcccattgccttataaattattgaatatatcggttattaaatttgtagcctacaaaaccacttctgagataacttggcctgcctagcatagagttaagcttagaataattttctagctaccaaatttcaggaaggatttgattttatttggttaattatggagaacaacaagctttattaggatttcattatagtcctctgaatcccatgagatttccatagttagaaatgaatttttaaagtcttgctgaaatagcttcgattatttcttgaggttttttaaaaatgatactttactttggtggcttatctgttgttgaccttaaagtgaccataatatactttttaatattttcttcaaaataataatgataagcacaatacagtatttttaaccataggcacttagctgtatagtagatctctagaattcattcatgtagcataattgaaactttataaccattgaacaactcctcacctctcttaacttgcccctgacaaccactgttatattctctgcttctatgagtttgactattatagatacctcacataagtgtaataataaactatttacccttcttgaatggcttctttctcttagcataatgtccttcaggttcatccatgttgtctcaaatggcaggattttcttttttttaaggatgaataattccattgtatactacattttctttatgcatttatctgtcaatggaaacaggttgttttcatatcttggctattgtgactaattttacaatgaacatgggaatgaagatgtctctttgagatcctgatttcaatccctttgaatatatacccagaggtggtattgctggatcatatgttaagaaggtagatttcctgttaggtgttcttcccaggaaaatgaaagaaaacaaaaacaaagggacacaaaaaaacttggagaagttgcatacatctattaccttgagtggtgatggttgtgtgggtatttgcatacatccaaattcatcaaattatacaccctgaatatgtgcagttctttgtatatcaattatacctcaataaagctgttaaaatttaaaaatatatatataataaaataacaaaataatgatgaagccaacacatgttaagaatttatcatatgcaaggcattctgagaaactcatcacaaggattacttcatttaatactcacatagtcctctgaagtagttgctatcattattccagtttgcagatgaagaaatgcaggcacagagaaggaaaatatttggccatgggtcacacagctaatggacttagttctgtataactgcagaactcatactgttagcaactgtggttgtctgtaattaatttaaagatagaataagttaaatctggtattttcatttcatagtgtttaatgtcctaatgattaatttttaagtgtataaattaatgttttattatcttcaaaagcaaataaagcaagcatttttttattgctatgatcccaattttttctcctctacaaaattgataaacaataataaagtgttcccatttctgatttataacataatgcaaaatgtattgttttcaaatttctaagataagaataaagttattttcacaattaaatattttagaagaagaagagtggtattcgggtattctaaactaataactggcatttccttattttccttctctccttcatctttccttccctttgcctctcattagcccaccttttacatgtacgtttgggtgcttctttctcgggcttataatcacataaagctttctataattcaatattactctaaatagtcatcctcatttgagtgagactggcaaacaggtaacaagaacaacattagtcattattttcatcttcttgactattctccttctccaaacatcttttgcttcccccttttaagaaagaaattatggatataagtgcactttaatatgtttacctaactggaggtttatgccatagcaacatggctcagtgtctcttcaggaggtatattccctgtctcctccctttcctttcatccctgtccttgtatttgtatgcaactcttcctctctctgacccccttcttgtttaacattcattcttctcttccattcaagaaaggaaatgtagaatgggaacataaagtggcattggagcaagactagaagtgctatgtttctccagggagatcatgcggccaatggaaatactttagtactggtgcttctttattagcccagggaattataagggtatttcaacctgctctttgtaataactccggggaataataaacagggaagatcagggagaagagccgccatgtttggtatggtaaagcatgcaacggaatccatagaatttgccatctcagtttggaatgtaagccaaatatggcaattggagatggcgctccacccctccgattcgcaagatatccgtcggtatttaatccagtctaattctgaccctgagtgatcatgggagaggagcccttagttgccaggctttccctttagaatactgtctgattaaatgcgctctgttactctggtagaaaaagggaatttaagtaactggcaccttgaaatgccctgcagctaaagatagctctaaaataaatgcataattgtgagctcccatgacatgtacagcacaagatgtccgagtgaaaattcaaagtcatgcgcatgtaagaaggaatgttatttcccaaccacacacacaccatgcaatttcattcagtgactaagagcttaggagccagactacttggtttcaaatcctggctcagaggcctccaactgtgtgattgcaaccaccccaagccttgattttctcttctgtacacttgtgatagcacttcccttatacaggggcaaaatttggttattgatcacaccgcccagcacatacaaattactcagtaaatgttaaggaaggaagaagatttagagtagctggctttcaacactgggggatgtgattgtttttaacctggattggggcaagtttgtgagagactttaaaacaactatagcaattggtagttatcctggggctcttagcattctagttgctttttcacttctctatatcaccctccccaatttcccttagcaaaaacaaggactcttttgtattttccttaccaccattatgtctatcatatagcaaacattaagaaataaggtgaacagactattttggtatcaattactcattttattccctaatcatagttcatgattccatctcttccaacaaaagatcaaggcctctcatttcttctatcagccacagaaaacgagttggacccaggcactggtggacacataatgagtctctgagtggaagaattctgtcctctctttgttatcctgtctactatatgtgttgtttatccttctgaatgaaaagagaattgaactccaattattctggaattcaatgctgcaagagttggcttggaaaactatgtgtccaacaatggaagactttggagtccgtgagaagaacagagttttatctgattatataaaaagatcagttcaggtgcagcctctccagccaagagaaggagggccctctctctacttcttactggctcctgatagcatatggtctaggtagtgcagagtgaaatagaaacatcacctcaaattcagtggctcactggatcaattcactttaatatatatttcataattagttcctttacctcctccccagattaaaaaaatcatttttatttcaaattattagtcataaaggatgtacttgagtcaatatgtaaaatagagggacttgataaagtagattttctttaaatttatcttgcaaaagaaaagtaaaacagtttttctttttaaaaaaaatagtaaaatcatacaaacttatgacagagcagggagtgggatacaggcctgaactgcaatgccaggtcttctacttaaatgccatgtactgcctctactgcaagacgataattacatttttttgtgagtttcaaaaaaatgctattgtcttgtgtcttaattattaattatagcaaaacatatagatctgaatatttctttttaaaatattttgtctttatcacaacagtgaatttctttattcaatgctactgccccaaattaaattcccactaaaacttacatcatttaactgtgacaaaacaactagtcaaaatagtattttagtcctgtgtaaacaaactaactaacagataaagagaactttcactgttcagctgattgtcatgaggctgtgctgactgagtcaaaggaaaaggtaaataaagcaagagactgacttcaatataaatcaatactgtctagaatcaacatgcaacacaacacttatgcatttaccaagaaatatttaccatattttgtatgttataggagggctgaaagaagtatcttagcacacaattgctgattaattggtggtatacatggagtgaaagaatcccaaggtaaagaaatgagttggtgatatgggaaacacacacacacacaaagaaatattctattaaataccaagtctgtctttgttttcagcatagatgtggcaacaacctattgaaaatttggaagtgagctggcaatatttagaaacaaatttagccctgctgagaaatatcctgatccaattacctgagtttatttcagaataaaataaagttgttaggaaacaaagatgtaacatcttgggaataaaattgtatgtgtgaaggtgtgtgtaagcaaggtagagagaatacaaaagtctcttcaattctaaatgattagttgcaataaactgtcttttgctggtgaatataataatgaaaaggcattaacgaaattgattttttaaaaatattgattgtcacaaaggaaatcattgcctctatttcaaaagtcagcaatgcagaaatgagaaaaccaacccatagtaaaactgcagaggtcagaggccaagttttatcttctctgtatgtgccatagcatataattggaagaaaagacctgacaaaggcatatttcccaatggccctactgagaagaaaatatctattgtggctagaactattaagatcaggaggctttatagcaatatttattcaccacagattaaattgtgaaaaatcaatatatttgtttaaaaaggtgaataacaaaaaaagtatattgttttctaaatctctttgaagattttcaataagggtgcaagtttttaccccacccatttccaaacacacacacacacagacacacacacaaacacacacacatctctcctgtttttaagtgcatgattgtcacctactttaatttatgccaatatccatgctagacctaggtgctctaattggatacaaaagcaataattgtaatgggatgtggttaacctctcaaaggcctgttagttcactcagctgtgacagctgggggaaattaaagtagttccaataaatcactcaaaagcagatagaaactgctaatagaaagagaactttaaggaaaaagaaatatctggtaaaaaaaattctagcattagagctatcaatctatcatttatttaaatcttactctagcttctgttcctccctagcatcttccataaagtattttaaaagagcaggctgaggtggattttcctaaatttgagtttctcttctatgggatttctgtgatgttttcttggctcaatattgacctgatagtaatttttattaaggtcccatgcttagcatcaaatacgtgtacactcacagactgaacatttaaaatggaccagcattatagcatggactcttggtattcaccactttagcatcccagactttcactactcaaaaaacaaaactccaaaggtccatgaaatcttgtgatttttgattaagtggaggcaaaaaaactttttaaactgttttgcattgcaagagtaaggtatgtagctcctgagtgaatttagttaactatccaataccctgtttatattgtatatattttagaggagaaatattaagtcatgttgaggttaaatgacttgttctgggactataagtggcggatagatggggtgcatttagtctagatctcctgaacgatgcctagcaataactaaaattataaatattccttcaaaattactttaaagctcaatgcaaatcttctctttttaaagaactttccaggtttacttctgcacatcgggaaacaaaaattttacttcaagttgaagagttgaattgtttgaagcacagttaaatgataattttatgtattttatacatttgtgaaatctatataacttggagttatcaacagatgttatagttaagaattcttgctgaactttgcaaattatctttattcaagacagaatctgaatgtcaaaacttttttttgcaattggcatcttttctttttcagttatttctctaggattccactgtgacatcctagcagaattctttttatttatttatttattcattttattatactttaagttctaggatacatgtgcacaacatgcaggtttgttacatatgtatacatgtgccatgttggtgtgctgaacccattaactcatcatttacattaggtatatctcctaatgctatccctcccccctcccccaccccatgacaggccctggtgtgtgatgttccccttcctgtgtccaagtgttctcattgttcaattcccacctatgagtgagaacatgcggtgtttggttttttgtccttgcaatagtttgctgagaatgatggtttccagcttcatccatatccctgcaaaggacatgaactcatccttttttatggctgcatagtattccatggtgtatatgtgccacattttcttaatccagtctatcactgatggacgtttgggttggttccaagtctttgctattgtgaatagtgctgcaataaacatacgtgtgcatgtgtctttatagcagcatgatttataatcctttgggtatatacccagtaatgggatggctgggtcaaatggtatttctagttctagattcttgaggaatcgccacactgtcttccacaatggttgaactagtttacagtcccagcaacagtgtaaaagtgttcctatttctccacatcctctccagcacctgttgtttcctgactttttaatggtcaccattctaactggtgtgacatggtatctcattgtggttttgatttacatttctctgatggccagtgatgatgagcattttttcatgtgttttttggctgcataaatgtcttcttttgagaagtgtctgttcatatcctttgcccactttttgatggggttgtttgtttttcttgtaaatttgtttgtgttctttgtagattctggatattagccctttgtcagataagtagattgcaaaatttttctcccattctgtaggttgcctgttcactctgatggtagtttcttttgctgtgcagaagctctttagttgaattagatcccatttgtcaattttggcttttattgccattgcttttggtattttagacatgaagtccttgcccatgcctatgtcctgaatggtattgcctaggttttcttctagggtttttatggttttaggtcttacgtttaagtctttaatccatcttgaattaatttttgtataaggtgtaaggaagggatccagtttcagctttctacacatggatagccggttttcccagcaccatttattaaatagggaatcctttccccatttcttgtttttgtcaggtttgtcaaagatcagattgttgtagatgtgtggcattatttctgaggcctctgttctgttccattggtctatatctctgttttggtaccagtaccatgctgttttggttactatagccttgcagtatagtttgaagtcaggtagcctgatgcctccagctttgttcttttggcttaggattgtcttggcaatgcaggcccttttttggctccatatatactttaaagtagttttttccaattctgtgaagaaaggcattggtagctttatgggaatggcattgaatctataaattaccttgggcagtgtggccattttgacgatattgattcttcctatccatgagcatggaatgttccatttgtttgtgtcctcttttatttcgttgagcagtggtttgcagttctccttgaagaggtccttcacatcccttgtaagttggattcctaggtattttattctctttgaagcaattgtgaatgggagttcactcatgatttcatatccagccaaactaagcttcataagtgaaggagaaataaaatcctttacagacaagcaaatgctgagagattttgtcactaccaggcctgccctagaagagctcctgaaggaagcactaatcatggaaaggaacaaccagtaccagccactgaaaaaacatgccaaattgtaaagaccatcaacgctaggaagaaactgcatcaactaaacagcaaaataactagctaacatcataatgacaggatcaaattcacacataacaatattaaccttaaatgtaaatgagctaaatgctccaattaacagacacagactggcaaattggataaagagtcaagatccatcagtgtgctgtattcaggagacccatctcacgtgcagagacacacataggctcaaaataaagggatggaggaggatctaccaagcaaatggaaaggaaaaaaaagcagggattgcaatcctagtctctgataaaacagactttaaaccaacaaagatgaaaagagacaaagaaggccattacataatggtaaagggatccattcaacaagaagagctaactatcctaaacatatatgcacccaatacaggagcacccagattcataaagcaagtccttagagacgtacaaagagacttagactcccacacaataataatgggagactttaacaccccacggtcaacattagacagatcaacaagacagaaagttaacaaggatatccaggaattgaactcagctctgcaccaagtggacctaatagacatctacagaactctccaccccaaattaacagaatataccttcttctcagcaccacatcacacttattccaaaattgaccacatagttggaagtaaagcactcctcagcaaatgtaaaagaacagaaattataacaaactgtctctcagaccacagtgcaatcaaactagaactaggattaagaaactcactcaaaactgctcaactacatggaaactgaacaacctgctcctgaatgactactgggtacataacgaaatgaaggcagaaataaagatgttcttcgaaaccaatgagaacaaagacaaaacataccagaatctctgggacacattcaaagcagtgtgtagagggaaatttatagcactaaatgcccacaagataaagcaagaaaaacctaaaattgacaccctaacatcacaattaaaagaactagagaagcaaaagcaaacacattcaaaagctagcagaaagcaagaaataactaaaatcagagcagaactgaaggagatagagacacaaatcccttcaaaaaaatcagtgaatccgggagatggttttttgaaaagataaacaaaattgatagaccactagcaagactaataaagaagaaaagagagaagaatcaaatagatgcaataaaaaatgataaaggggatatcaccaccgatcccacagaaatacaaactaccatcagagaatactatacatctctatgcaaataaactagaaaatctagaagaaattgataaattcctggacacatacaccctcccaagactaaaccagagagaagttgaatccctgaataggccaacaacaggctctgaaattgaggcaataattaatagcctaccaaccaaaaaaagacatgctagcagaattctttggagtcccaaaacaggacgttcttgaccacttgctgcctactgtctttgagtagcccaaaacccacagacagcactaaactggggtggtgggggcagattatatgctgctgagtggaagagttcccactccagcagttgggagggaaaagactgcagcaagcacaccccaagaggcttaggcagttcaatcctagtgccagcagagggcaatcatttctgttcctggaagaaacaactacattctccctacatggaaagaagtcaaaagcatgactcacaacattaagaggaataatatctacaaatcatcatcaacgacagccaaatataacttatttaaggtattgattcatataaggaaagaaaatcaagttgtaaaagcaaaaacagatagcttccattgaaatagaacgaatacccagcactttgcaaggctgaggcgggaggatcacttgagcccaggagttacagatcagcctgggcaaaatggtgaaacttcatctctactgaaaatacaaaaattggctgggcgtggcggcctgcacctgtattcccagctactcaggaggctgaggtggaaggatcacctgagcctggaaggcagagtttgcagtgagctgagatcataccagcctgggtgacagagccaataataataatactgtctcaataatagtgtctcaataataataataataacaataataataataaataaataaaactgatagaagagatgaacaaaatctttaagcaaaacatgaggttcttcaaagagacaattacagttccaaaaagactttctagagttaacaaatatatttctactatttaagaaattaaatttttaaaatgaaaggaaagagagaatgatgtatgttaataagccatttagggttttcaaagattaagagaaaaaagttgcaacaaaaagtgaagttctacagagctgtaatttataggtaaaagaacatgaggcaggtgaacagatctggaagatctaaggagaatataataggtgtcctcgaaagagctgccagactacagataggaaatgaatcattagacaaaagttaaaataaaaaaagaggaggaagctaccgtaatttgttgagtcttcagatcaaaagagacaatgtgccctgggccgtattaatggacacaaacacacacacacatacacacacaccccttgacattgcatgttaacattccagacatgcaaagagaaagagaaaatttttacaatctccagaaataaaattacaaaagaaggctagatgacactttccaaatcacctttcattaagagtaacttaaaatgtatgagtactaggcttaatacatgggtgatgaaataatctgtacgacaaactcccatgacaaaagtttgcctatgtatcaaacctgcccttgtacctctgaacctaaaataaaagttaagaaaatagtaataaaaatgtatttgacaaatccatcttgagccatgtaacagaggttaatcagaaatggtggggtagagggtacttgataaagtgcctcattaactctgataataatgagacagtaacttgatgagaataacacatagtaacattttatgaatatataatccatttactaagaaacaggttaattcactaaattactgtacctacctgtaatatcggctgtgagaaagtaaatcatggtatacaccatttctaccataaaatgaaactgtggtttgaaagaaaataccagctttgacctaatgactttagctttaaatatttgtctataccttgcaaactgaattgcttagaaattactaacctgatttacttcggaaagactcttccctggtgttcatcactgagaaactgtagtgtatgtgtgcaagaacacagactctggccccagacctgctggatttgcatcttagatccacctcttacctgtgtggtctccatgtcccatcccttatctgtaaagccagtgtactgagagcattcacctcacagagtgatggggaaggttaaataagtacataatgcacttagaacagtgtttgtcaccaacttagtgccacacgagcatttacattattttcattgctgctgtagttaatgtgtagttggctgtcattcagtgcaccagtatccggcaccagaagcagagtggacccagcacccttcccacgagatcatgggccacctcgtgtcagaacgttcggaaactgagatttcctggtttgaaacattagtctaaggccaaggtgaatgaaatagggtcaggtgaaatttaaaaaaccaaaataaaaaaacaaacaaacaaattaagtttaaaatacttagaaagttagattgtcagccgttactcttacagctacctgcccgtttgcctccagaaattgtttgctgacattctcgttcatcctaatctactatggattaaagttaaaattgtttctaaaataaaaataaataatgtcttggcaagacacaaaaataatctaacatggatagaacataagagcttaatgtaagatatgtttgttttggagctactcaactgtttgccatataattcctatttgtttattattgtggtttatctattttgggtgatgagggaatgggttatattttagatagctgcagtagttgtacaggtcttctggtaaatgaaatacagctaaagaacaattttttcctgctaaccaacaattctttccagtctccctcactctgaacttggaataatctcttttctctcaactcttttagtcaccaaatctcagccttttaattgtctcatttatagtctcttctccatttctatcaccaatattgtcctttttactgatgtttttatgatagcagaattactatcagtctcctatcttgatttcctaattaatcaccagtacatccagtttcaacatgaacaagggactttcttctctcaacataatttgtcttttcttttaaattctgaattgctcaaagacagggaccaggccgaggtgtggtggctcaagcctgtaatcccaacactttgggaggccatggcaggaggatcacttgagtccaggattttgagaccaccctggacaacatagcaagaccatgtttcaaaaaacaaataaataaataaataattttaaaaggaccatgttatattcatctctatatttccattttttttttatcagttttaatacctgatatacaataattggagggtataggagtgcgggtatggggagtttttatttttaattttacttccagggctaagagtgttgttattaagctcagtgcttttacattatgaagcttagtttacaaagccctttcgggttatcatgtgcttgtttaggaatcattggctttctttgtttttgtcttttcaaccttttcaaatgtctactgcatatgccaaaggcagaatctaaatctctggatatcatgtgtgactacttgaaaacgtgtctctccaactgttagagacaaaaagattctctgtaaaaaaaaatatatatatcctgaagataatctgattttaatactggaaataacaattttgatgagtaatttatgttaaaggaaaaaaatattacaagtgagtcatttctttgatgaaacaacaggtggcagcaaagggggtaatattggcatccctacttttcagaataattggaaccgaaaattgcttttggaagtccattttgaatcctgtcttaaaaccaataaaatttttgaaatatcagtatacagatttttagtaattatgttataagatattctgctttttaaaataattctgtttgtaggacaaatgggcagaaatgtggatcttttaagagttcccttggaaccttcatttaaaaagacgggtcactttttggtagatctaaaaagaagaaacataaaccaactaaacagatgcttagcttccaaacaaatgctcacagaacctctctcttgcattggccaaattttctcttcctataaagcaatctgtccgtcacagcaacatttcattgttttcaaatcaccaaatttagtttattgtaaggtttggtataagttgttttttaaaattcagaactaaaatcttttgacaggaaatgctaaagttgaataaagataattaatgtagtataataggtatcaggatttatctggaaaattaaaagagcaatagcattgattctaataattcctgagcttaaagtgcactttgatatgaattatctgcataaactaatatgttttctctatttatgcaattgtagcagtgacaacagctctttctgttagtgaaatcctctttcatatgtagtcttgtttgtagaggaagctaaggtctgagggggaagaatcctctttttactcaaaggggagcagaaagaaaatagtgaatagttataccaaatcactgaagtagctccagatgtaccaaaagtaacgatgattacaagtcacacactgaaagctacactcaagtttaattatcagtacagttctgatacatttaagacttcctatccacttataaatgtaactcccatcttctttctttaaaataaataacctgcacttttagaaatggattttagagatggcttatagcaactttattttttacttttcttttcttttttaaactggaagtgtgaagggagaaattttgccagatgacaagatgatttcaggagaggtgaagatccatgcagtgctataaaataagcagtaatgcatttatagtccccagatttcctttcatcatctcatcctttcctcctagtaatgccaccattacccacctcaggcccacgtgccttcctagttcttctttctcctactctttaaaacttactttgagatcccacattcacacacaacataaatacgttgtaacagaggccaaagctttgtgttaaagttctattgagcagaatttcatgctcccaactgtcaaatggagcgggacttaaaagacatgaagtcacatgggagagctaagggtattgaactgagactaaatcatgtagttgcctcttcctctgtttccacatacaactggctgaaaccattgcagttacacacagtcaaactcatttcagacatggccatggtatttgtctgcaagacacatgacttctatatttgcaataatacgcacacacacagccaatacaagctgaagcttataatagacacacatggccaatacaaccggaacggttcatttgaaatgatatgaagaatacaggtttaaaaatggcaaagtagatctctaatttagcagtcttaaggaacaaagtcgacagcaacattcatgcctttgaagacttcctctctaaaaacaaataatgatctaagctggctttggagtgtttgcttccatcacacagcaatggctctctcccaaatggagaaacttctaaagtcaaaatgtgacttaacaacagggaaaagatagtaagaccagtgaaaatagtggaaaggcaatcgacacaagggaagaaagaaaagagagtcataataaaggaattttgttttcagagcaggaagaatcacatgcaccaggactgtcaggttcagtcaaaaacatgtggaaaatatgtcccctagtcaggccactcttggcaatgaaccataactgtgagtgttgggtcagtatcaagttctcctgaacaccatggcttacaaacaggaaaaaaaggaagcatctgagtcaggtcccccccaaaaaaggacaacagtgtgtatgtcctcattgtgtttggttatctctaaatgaaaataaatgtggtgccccctggatcgccgccagaacaaggtgatgatatagagatggattcatgccactttctgttctcttgtaactcttttaggaaagaaaagttcttagtgcacaattatatcattaaaaacaagagctgtaaagccctcatgacaataacatgcctgattcttcacagattgagaataatcatgcttcaaagcccattaaaatcttgaagaaaccacaatttatgaggtagaaattaagccacacaaaatagacaaagctatactgagcaaaaaggacaaaattggaggacccagattatctgacttcaagttatactgcagagctatggtaatcaatacagcatgatactagcataaaaacagacacatagaccaatggaacagaacagagaacccagaagcaagtccatacatgtacagtgaactcatctttgacaacagtgccaaaaacatccattgcagaaagaacagtctttttaataaacggtcctgggaaaactggatatccatatgcagaagaatgaaactagactgccatctctcaccatatataaaaatcaaatgaaaatggattgaagacttaaatctaagacctaaaactatgaaactactacaagaaaacatgggagaaactctccaggacattgaactgagcaaaaaattcttgagtaataccccataaactcaggcaaccaaaacaaaaatggacaaatagtatcacgacaagttaaaatgcttatgcacagcaaaggatacaatcaacaaagtaaagaggcaacccgcggaatggcagaaattatttgcaaacaatccatctgacgagggattaataaccagaatacataaggagctaaagcaattctatagggaaaaaatctaataaaccaattttaaaatgggcaaaagatctgaatagacatctctcaaaagaagacatacaaatggcaaacaggcatatgaaaaggtgttccacatcattgatcatcaaaaaaatgaaaatcaaacctacaatgagatatcatctaccccagttaattattgccaaaagacaggcaataacaaatgctggcgaggatgtggacaaaagggagtccttatatgctgttggtgggaatgtaaattagtacaatcactatggagaacagtttagagatttctccaaaaactaaaactagagctaccatataatccagtaatccaactgctagggatacactcaaaagaaagaaataagtatatttatgagatatttgcactcccacgtttattgcagcactattaacaatagccaatatttggaaacatcctgtgtccatcaacagatgaatagataaagacagtgtggttttccattcctgagttacttctgtgttctcactgatgtgtaggagctaagctatggggacgcaaaggcataagaataatacagtacttgggaggctgaggcaggagaactgcttgaacccaggaggtggaggttgcagtgggccgagatcgtgccactgcactccagcttgggcaacagagaaagactcaatctcaaaaaaaaaaaaagatacagtagactttggggacttggggtgacaagtgggagtggggcgagggataaaagacaacaaatatggtgcagcgatactgttcgggtgatgggtggcaccaggagctcacaaatctccactaaagaacttatgtaaccaaataccacctgtaccccaataacttatggaaaaataaaaaaaaattaaagacaatgttgtacatatacacaatggagtactactattcagctattaaaaataatgagattctgtcatttgcaacaacatgaatggaactggaggtcattatgctaagtgaaaaaatccaggcaaagaaagccaagcatcgcatgttctcgcttattcgtaggaactaaaaattataacaattgaactcatagagatagagagtagaatgatagtcatcagagactgggaggggtagttggaagagaatagcggggtggaggtgggaatggttaatgggtacaaaaaatagaaagaataaataagatctagtaattggtagcacaactatagtcaataataatttaattatacatttaaaaataactaaaagatcgtatgtctccatcaaaatatcccatatactccataaatatacacctgatatgtacccagaaaaaaacattttaaaattacaaaatttaaaaattaaaaaaaaataagccacagatttgggacatctttctgttcaacgcagttcaaacagttaatcacattattgcacagatacaatccataacataagatcttaaatgcgtggatacaagccaatgtctctctaatgaccacataatgaaagtgtatataattaggggtatgaatcctcactagaaaagtatgtttctaggttttgggtactagaactcctccaacttctccaaatagctgagaccacctaggatttcaggatacagagaagagaatttgtttgattcatggaatgttaggacatgtaactgataataacaattataatattactgttatagatgacatatagtatatgccatgtagtgagggtaagcctgtcatgtgaattatctcatttaattctcacaagaccctatggaatagattctaaagttccacaattactggatgaacacccttggagaaaaatcagttctggaattccaaatattttggattttagaaaggcaatattagatagatagatagatagatagatagatagatagatagatagatacacacacacacacacacacacagagctgtgtgatcccagtgtaatctcatccatgaaccaatattgatatatcattacccactagagtcccagctattttaatggttttttgtttttgtttttgtttttgtttttgtttttgtgacggagttttgctcttgttgcccaggctggagtgcaatggtgcgatctcggctcactgcaacctccacctcccaggttcaagcaattctcctgcctcagcctcccaaacggtttttatctaacacccttttccaggatatcacattgcacttagctgccatgtctcctcaagcttctcctggattcagcagttcctcacactttccttgtctttgaataccttgggtttaggagaatactggtcaggtagcttgtagaatgctcttcagctggaatttatctgctatatttctcatgattacactggggtcacaggtttggtggaagaacccagaagtaaagtgttattcacatcacatcatatatattatgtgcatactatcaacatgatctaactctgttgataattaaccttgctcaccttactgaagtgatgtttattatgtttccattctgtgtagatatgcccgctattccccattttatactatttggaaggaagtcactatacctagttcatgttttaggagagaggaattatattacatctcattaagggtggagtatctacataaattatttggaatatgtctgcacaggagatctctctattctcccttatttattattttcatttgcttatggaatcaaggaaatttattttacactttgggttataatctaatatcactttgttttgttcaaatgattgtaactgtggtcattgggagttctgtcacttgtctcatcatgtatatctcctgtcccaaccctagaatcagtcattcctgtaattatctctggatctttatattgaagaatgttatgagaaactaaaatctgggtgctaatatgtgttcattgttattggaattttttcctagtgtttcaagatgacagagtaaaagaaaaatatatttatactaacgcacatatatacacatatctataagtatttctatatttaactgctatagtctgaatattcatgctccctaaaaattcatatgttttaacctaatcatcaatgtgctgatattagaaggtggggacctctgtgaggtgattagatcataatggcagaggcctcatgcatggcattagtgtccttattaaaaaggtcccagaggcctgtcttgtcccttctgccaggtgagaatgcagcaagaagacatcttccatgaaccaggaagtgagcctcaccagacacaaaatccactgttgccttgatcttggacttcctctcctccagaactgtgagaaataaatttctgttgtttataagctacttggtgtatgacattttgttatagcagcctgaaatcactgactgtaactacctgtgtctctgttaatctaaatgagttttcctactgatatatccaactctaatccattaccacatggatcattctagcctgttctccttgcatgtctgtaaattctcactactacagtaaaaatcctggctttgactatctaccatccgtttacttatttcttcaatttgagagtatatatatatagtgttttcagattttttagtctctaccctcatggaaaataactttatcagctaaaacacagtgcttatgtacagttccttttgactttagtcagtctccactcattttcagttacttaatgactcaagacatttttcttcactccattcagtgaggatatatcataaatgggtaatacagttttattcttttgtcacatttttcattctacgttggaatactccaatatcctaatgatgttttttcatatgttgaggtttaccttttgtgctgtaatcttctatgtgctttgataaatgtagagttccatgaatccaccattaaagtatcaaaataaaacacaaaatagtttcataactctaaacaatgctgtaagttcttctattcaacacttcctccacaaactcctaggaaaaattgcccctataactttgcctattctaggatgtcataaaaatggaatgatatattgtgtagtcctttcagagtggccttttaatgtcttatttatttaagatttgtcaaggcttttacatgacttgatagttaattcccctttttccctgaattgcattccattatatgaatacatccagtctatttatccacttacctattaaaggattacttccagtatttggtaactatgaataaagctgctataaacacttatattcagtattctctgtggacataaatcttcaaatcagttgggtaaatgcctatggagtgtgatttcagagtcatataataagaccattttgctttgaaaaaaaaaacctgcctaactgtcttacaaagtgactgcagaatgttactttcccataagcaatgacagtctttttcttttttctatataattgccagcgattgttatgtccgttatttaggattttagctattctaatagatatacattaataggatttcaatttgcaattctctaatggcatgatgttgagcatctttttacatgcttttttgatacctgtataaattttttgatgagatgcctaattcaaattttttcaccattttttaatcgggttatttgttttctaagggtttttttccctctatttagatactcgtactttataaaatatgtactttgcaagtattttgagtcctcactgtattttttattttctttacaatgccattcccagtgcaaatactttttaatttaatgaagttcaacctcccaattattttcatggattgtgatatgggtgttataactataaactcatcatccaacccaagattgtgtattttcttctgtgttttcttccaaaagatgtatagttttgcaattttctttgggttaataattcatttcgagttaattttaatgtaatgtgtattgtctgcatttaggtccttttttcccctttggcatatggatttccattgctgcagcatcatttattgaaaatattacctattctcagctgagttgtcattatcaaaatccagtttactgtatttgggtgggtctatctctaggttacctattctcttacactgatgtgtagagaaataagtcttgaaatcatttagtctgagttttcctctggttttttttctccttctatattgtatatggcattctaggtctcttgacttttcatatgcattttacaacaagcttgataatatttaaaaattactgtcctggaactttggaattcaattgagtatatatttcaagttgggaaaaaatgacatcttaacaatatagatcttgcatagaacatagaaaatctctccgtttatttagatagtctacttctttcatcaatgtcttgtagttttctatataccggaactatacatatatgtttgatttatatctaagtatttcttggtactattgtagattttttaaaatttcaaattccaattgttcattgctagtatgtaagaaaaaattaacttttgcatattggttttgtatcctctaaccttgttatgcttgactattagctccaggagtgtgtgtgtgtgtgtgtgtgtgtgtgtgtgtgtgtgtgtgtgtgtgtaaatccatctgtgaatacagttttattacttcctttccagtacacacacatcttatttactgtttatgttttattgcattagctagaacctggcagtacaatgtcagatagaactggtgagagtctatgtccttgccctgttcctgatcttggggagaaaatgtattgcctctcaccattaagaatgatattagctgcaattttttaataaatgtaatttatcaagttgaggaagttccccttctattccgagtttgctgacatattttattatgaatgggtgttggagtttgttttttgtcagttgatataatgttgtaatttaattccttaaggcttctgatttggtggatgacattgattagttttcaaatgtctttttatacctggaataaatgccactttgggatggcattttttaaatatattaatatgtagttttgatttaaaatattttgtcacatatttttgcattaatattcatgaaagatatagttttcttttcttgtaattctttctgtagttttcttttcttgtaatgtctttatctgtttggggtatcagataaacaaattgagctagaaagtgttctttctttactttgggattctctaagtcctcctcagagagctcttgcagctctttcatgtagaattatatggagtcttactgtagcagcaaaatgtggaggatggagagaattctacaatcttccaattaagtctggtcatttagtgttctgtctctcagggctgtggtcttcacatgtgtttcctagctttactccttcttactcatttcacagaagaaaaaaaaacagaagcaaagtagtcggagtaaatgtgtctaaaatcatgaagagctaggatttgaacccaatcagtaatatgacagagcttttctcataacttaaatcttctcctggttttctgaagcccgaactagcagaatattcaaaagcacacattttggtcaaggcctatgtacaatgaaggaacacctgaaaaaaatgtttgcatgcttttcccttttcagcctatatctgtcccactaatttttcgtgaacaaactgcactttaaagatcaccctacaggtcaagactctgacattctgtaatcagatataaacacagaacacttagccagccagctctgtggatttaagcaatttaatatctctaaacttagttttcccaattgtaagatgaagaaaataatagcatgaaattcatagtttcctgagaaaaataaatgaaatgatgtcggtataggtcttagcatagtgttgacatagagtaagtgctcaataaatattaaatagcatcacttacagactcataaatttcatcttaaagtgggctgagtattcagaataaaggagaaataaatgtttatccaaaggagtatttgggaatctgtgaggaaatagtttgatcatcataataactagggttttattttggtttttagcattctggggccagagatgcaaattaacctgccacatacagtcctatgcggtgaagaattgtccaagtcaaaatgttaatagtgaacatggagaaacacttatgaaaaaacagatcaaaaggaatgacagaaagtaggtactgagataatcaatgctcttctgctttgaggcatatttcaaatccattgattgtaacacaaaaagaaagcagtaggataattttaaatattattttccattcacattgggtacctagcacaaagtaccctaattctaacataacatgctattttagtgccaaattatttattccatccccaacttccaactccaaaattctcctttgtgaaatgtttgctatttcattgggttgttgattctctaaaatggctgtgtttttccatgtttacagacttagctctcaatatatctgctttatataaaatatctctattattccagatttatttttcttcatcttatcaacaaagtggaagcaagaggacaatcatataactttgaaactgcaggttttcaagacataccaaagctatttcaaaaatgtgaattaaaagcaatataatattttatgttctaactataagaaggcagctagctcagattacaggtagtgtacacagattgctcttattcctagtagatttaaaatgtatgaacatgggcctggcacggtggctcacgcctgtaatcccagcactttgggaggccaaggtgggtggatcacgaggtcagaagtttgagaccagcctggccaagatggtgaaaccccatctctactaacaatacaaaaattagccaggtgcactggcaggcacctgtcatcccagctactcgggaggctgaggcaggaaaatctcttgaactcaggaggcagaggtttcagtgagccgagatcgtgccactgtattccagcctgggcaacagagtgagactctgtcttaaaaaaaaagtatgaatttgataattttaagatataagaaatcagagacagtatagtctagtagtattgttttcactgtaatgtcgtaaataagtaaatgggcatgatcttttgagcacacaccaaggtttcctagcacatcccagagtcagctctatatcatgtccttactgggaattaattgtttcttcttctctctggttcacaattatcattgtgcaaggagatatgatcctatcactgcctgtattcacagaatccctcaaaaataatagcttctttttcattttgcttctctcaacatacagctcaagcaataataaaatgaatcaatatctgaaaaggcaacactagccactccacttcctttcctctccactatctctcttccaaggcaacagcaacaacaaaacatctcatgaaaattgccttctggaaaccatcacactagctcatcaggcatacccaaacctgtctcactcctagagcagatttggggtggttccatgatatcgcttccctagtatttctgccctgtacatgaaatgttaactatgtgtatcagttggttccatgaaattcaaaggcttcttttaaatcaaaccaattattcttctaatacaagactttaaaaaggaaacacaagatgtgttttggaagcactgaaacagaaaaccgtgagttctcctcactccaattatttatctttgaaatcctgataggttgctaaaatgggtttacaagcaagtcttttcagcccaagaaggtctcaattatctttttcttttttctcttctacctctcaaactcattaccctggctattgtcctatccactaagacactatttcacaggcattccccaatcttgggcaggagcaccattaattcgagcatttttctctcctctcttggacactgctagacccacagggtactctgcacttagtagacatctctgctttgtaccaaagacatcatgttgccaaaattatgcagcattctgttggcaaagttcgggagaatactttccttctcatctcttagaacgggaacaaaactctgtagtttacatcccaatatcttgtgttttctagtaaaatagagcttttaaacttttatatacggttatctttctttgtaggaaccagacaatcatctcggcataagcaagtgacagccaaaactgttctcagtttcattagttctgcccatctgaaatttggttacctgcgcaggcttggttgggatagcttctctcccaaggatcttttgctcctcatgtgaatatacttctgatgaaaatatcccatcatttctgattttgaccatgaatacaagggaggcacaaattggggactcccagaaatacttgggaggaaatttggggaggctaagaagtagttgtctgaaataaagtcatacgccaattgtcagtgaaacacaaaatacattttggaacatccaagtaggattacagtgggaagatgtaggtacaactttgtaaatataattgcacaatcaaaatgagtactaatccaggctcaaaaatctcattagggtaccaataaactcttacgtctaaggtgcctatggcaatgtctattctagttttgattcaagtcttcaactttctatcttcctctttttaccttttatcctcctccccctcccttttcctctctctctcacatttgtgtaatatttaaaagtatgattcagacagagttaaattttgatttcttaccacattactaatcgaattgtggtctgccagtgcatgaactgcttatttctggccaacaataagaaaagcacagaaatagatattaaccatttagaaacttgtattgccattgaagattaccacaacatttaattttaagcttgatgaatctagttataaaaactagagcttattttttctcttaactcggtttttctaacattttttattaatgtaatgaagggatccatctgtgacagatcagaaattaaaaaaaaagaaagaaccaccacaggtgattagacctgcctgaaccttttgtaacattcttttagcagaaaatgaatgtgtcatatgcatattggcttttccggaatccatgaggtgaatgaattttcaggcttggatgagtgttagaaactaaaataaactaaatgaccagaatcaccaccaaaatcagccctcataatagtctggcactaatgttgttgctgccaccgctatcacaatataaccagaccttggacctcagggggtctgttgctgtcactcactgtccctgaaatagcatcttccctctccccagtcctttgcattgctcaccctacattcaaactacggggttagaatatctcattggccacaccaacatccttccaagtgccttctgaaaatggctgttgggtctatgaataccggctgccactaacatctatcccatctgtggtagttcactttttcccaagagccagcctccgtttacaggcaatggagtagaagaagctgcttaggtagtcactgaagatattgaaggaatttaaatgagaatttgacatccaacatcaaggaagcattcctaaagtgtgagccacctactgttttgtggtaaatgaaaccactcatatataattgcctgtagctcaggagtatctgggcccctgctgaccatgtttaatgaaggacataaagccttacaattcccagatgcatgaactcgaatcaatattgttccttattgagttctcatttcctaaaaaaaagaggggccatcttatcttcaagacagtgtttcccagaatccataagaaagaaatatcaaatcttcacggcagtcgatgaaacacacataagattcttcagattacccacatgaaatgctagcatagcctctccttgatatcttgttttcctttataaaacatatattaatacagtaatttcatgttttctcagaagagagacacaaaattatgtatctaataagaagctgctattaaggaataaggcagaagaagcctataatagttggaataaaacacacacagtaatgtttcataggagacctaaagtactcataacttttttgtgtgatagaaaaaacaatgttttgttggtgggaggtgggaaggaaaatagaataggcttggggagagcttgttgttttctttactgcagaactgagtaggaaatagttccaatgacttagcatgtgacaggctcttagttattattcaaattaaagtgagtttctggagcatgtcatgtctgtaagcctgacatttttagaaatgacagtgtgtctgagaaaaagcttttagcatattctcagcggtagctaaatatgaaatgccagacttctccctgctctgctgaatgaatttttatggagaactgatgaatgattacattatcttgagggtgaaggagaatttaggatgtccttagtgtattttgctttagtctcccctttgtccctattctgcaaagaagtcaagtttaaaactcacagaaatgcacaacaattgtggtattatataaaattacaatgtcacaaagtgctaaaataataataattccactgatgtagagagggggaaataacatttaggcaaaagtaggtctaatacataatatcttaagtacaatgtgaaaaacatggtatgatctgtaaaaaaaaaatacgtcacttaccaatattacagttccaagtttcacattcatgctcaaatgaaaacttctcaagtgctgtcccgttacagaagaacacaaaacattattaaaattctatgccttggagccgggcacagtgactcatgcctataatcttagcactttgggaggccaaggtgtgagaattgcttgaggccaggagttcgaggccagcctggccaacctagcataaccccatctctaaaaaataaaaataaataattttttaaaaccctgtaactaggactcaaagcaccaaattctacctgtgtgctgtcaagtaagggaaagtcactcctttgacagactccaagagtccttaccaaaaaacctaatctgactcagcactattgagataatcatagtggtgttttcaccaggttgggctagtcttacaagtgtaaaaaagtaaattatagcattcccaagtaggaaggcaccatacacatcaatctttccaagtttaaatggccatattgatggcattgggtagaagagattatctgcttaccaacctgctttcctggaagtttacagaaacaactaccttttgctctgaattaacagaagtttttattttattttaggactatttcataagtactttcagagtcattattcagagatctgcctaaaagccccctctttctacagatgtgaaataaggaaaaatgcagataggagggatacgtgcatgttctctccattgcaatgtctgttgtgaggcgggaaggaaagggatatgaattctatcaaaattaatggaatgctattttcatgtcagctgatagaatttcatgggggcttttacaagcaatttaaaatgcatccactttgagtgtgcatattattacaggttgttgagtctgtatggcttgtcatttgaggccaaagcccattccttattcattcttccatgcccactgccttccacagtgccttgctaataggctcatacttcacttattaacacttaatcaaatctgaatgaatgaaagaagacactgagatttagactgtcataagaactacatttttttggctcaattttccttcttcacaaataataacaactattgtattagctggtttcacatgacaggcaatattctaattgctttggattctaacttattgaatccttataatgacattaggacattctactattacctccacacaaatgtgtaaactgaggcagaaagagattaagtaacttgcccaagatactgtagttattgtgtgtatgacccataacttcaactaaggcagcttgggtctggagctgggttcttaaacatttctctatgccattgaaggcacaagtgagttaaaaggaggatggcaaaactggcgcctctcaaaaatttttggaagtttcagtatctaagcagtttattatctcttattactttagcttttcactgagatcactttaccgataattcgctagacttctcatcttttaataaatttaaaacaaatctctttcccatagcacacaactttgcaaactttaaatacttctaataatgagagataggctctacttttttaagataaaattttaaagcagtatttctaccagtcctcttggaaatcctactatatgagggatataatagagtgaaatatttgaagacatagttaaatatgtctttttatttatttatttatttatttatttatttatttatttattctatgtgtctaaaatacaacttaatatttttcattgcaatagaaagtacatctgcttccatgataaagcccagcctttaactggccccagaccctggtgagcatgctctgggtattaaagcaccgacggttggtatatgtgtggattgaggtggaggatgaggtgtcgggggctgggttctgaaatcctacttactcttccaattttcaatttctactggtaataattaaattcacttaaaaatccttgtagcatttaaatctcatttcagattaaacttgtggtcatggtcgttgtggtagtgtcttttattgtttgctttttgtttggctttgtgtagggactaatttctgtgctgccacctttccaaagtttgcttctaaaaaaattgccatttcccagtccaactggatagagcagtgttgtattaatgttttaaaagcattgaatatggtgttagcacatatgctttcaactaccacatattttaggtgtaacaaccaaatcacttgacttcatttgctttgtcttccttatttgtgctatggatatcatgctagtccatttcttacagagttgtttcttcattcattaatttattttgcaggtcaacaaagagttcttgagcatctgccagaccaagtacagttctagacatcaaagaacctacaatgaataaagcaagtctctttcttcaggaaaattacagcataatgttgttgcaattaagtttttttcatgcatgtaaaaccctcgtgcatacatttggctgatacatactgaactctaaaaacacattactacccattttagtaattaacatttggcattcgccttgcctatgagagtttagaagtaaaagaacttattttcagctcttaggccctgattatctctgggggatcacaaggactactaactaaaaaaaatgaggagtgggagagtggagggaagcacagtatgggtgattaataacaattttgctagagctctgtgaaaagctgcatagaaagggtattttatatttgatgtttgagcagaatgtgaggaacaagatttgacaactagataagaatggaaggagtaatctgggcagaaggaacagtatgagcacaagctgagaggtgtgaagcttcatggcatgcatggaaaacagcagcaaaacagtctgacaggagtagaaagcaccagagatggcataggcaaggcaaattatggcatattataaacagcttcaagtgcgatgataagtcagaagctggaaatcatcctaaatataatgcagaaaaatatgaaggttttaaatcaggaaatgagagaatcaggtgtgcactctagaaatttaacagttagaagtacagattggagtgtgcaagcctggagatgagcatgtacattatgattttaggtaatagtttaggtaacatataaagaagtagcacagtgaggtgaaagggtagatagattacaaaatcatttcaaaggaggagaaaaaagagatttggtgaaaagaagtagataaagaagagactgaggaaagcaaatctttccaaatcaccttttaattatccttttggaggtgatattaaatattgaaggggtcaatagtccagaaggacagagagagagagaaaggtaggaagaaagagagagaaagagcagaggttgaggggagggaaaagatgtttggagatagatggatgtgatgccagtaatttggaaattaataaataaatatatatatatatacacatatatattactatatatgcataacatttgtcatcattttgagaatgtctgttgaatggctaagttgttatagtttttaaaacttaggaactcaaataaatcaaagatggcacatgcagaaagagggtacaatgaagaaatacggtccaatttcactaaacacaaataaaatagattcacagataaagagggcacacagagggactacaagtgagattaatgtataagacctgagaactgaagactcacaattgaaaatggtatcacggagagaaatacgtatttttctcacacattttagtacattaaatagaaaacataatctaaaaactaggaattaaagaaactcagtgaaacaggcatttatgattccactttgcatatgagaaaattagggcttagtagaggcatcatggccgataaagagatctgacactcaaactccaatctctgtccctttttcttttaaataatttgaaagatttttccattgtatcactccttatcttttagacatcaataagataaggtatttagtgatatcatagaatactgacttactgtcttaaatagaatgaaatggacttggtaggatactaacggaaagcaattgagttgttacttaccattcccattaacaccagctacggcataataaagaattattaatatgaccagcaaagtccaacattaaaactgaactttctgccaattaaaaacatttgcactccttagcttgggcctgtctaagatggaaggtactggcttgttttttctttacctgctctagtttctggctccttcagaatgagtaaattggggtgtcagggagagggtaggggacagcaaaggtgctaagacactggcaggattttaatttggtcttctggctctttctctcataaggtgcttttgtggatttctcaggaatgtctgtcatcaatggggatctctcattacagtttcctggaggtggaaatgcctccttcaggctggctgacagcttacaacagcccatcacctttcttattttttatttttattttttatttatttattttattattattatactttaagttttagggtacatgtgcacaatgtgcaggttagttacatatgtatacatgtgccatgctggtgtgctgcacccattaactcgtcatttagtattaggtatatctcctaatgctatccctccccctccccccaccccacaacagtccccagagtgtgatgttccccttcctgtgtccatgtgttctcattgttcaaagcccatcacctttcacttctgcatctggaaatctgtttccaggctccttttgaagcattcccctcactctgagtgggaccatctcaagacatctccctccatcatccatcattggtgctgttgtgactggctcccagtgtggcctccttactcagttaccaacaaaccaacctgtctagaagttaccatctgtcatgtgctccccaactcacagggacatacgtcccaaattctgtgataacttcttgtgaagcacgggtgtaccttgaaacacctcctttcccatatccaagtaagaacagaggctgttgaagtcagcttgtaaaatgatctccattaaacaacaggtcagtttcccttcccctccatatttctcagggaagcttctcatttctcagccacacacatacataaacattttacatcagaagtaaaaactctgcattaattctgtgtgtgtgtgtgtctgtgtgtgtgtgtgtgtgtgtgtgtgtgtgtgctgattgtcctacagcaaatgatgagcagttatgttttctttctttatggggcaaggggcatcacaggaaaataaaagaatgatgttcggtatctcaagttttaatctgcaccaaatcaacactttatataccatccgccataataggaaaaccaaaaacgaaatatgtagtctgtgtctattcaaacatgcactcctgaagccagttataacagaggttctcatgctgcagctcctcttgccaatatgttctgttcatcatttctcctttcttcttcttgcctagccttttcctgactcccattcattccactttttctaatgacattaaaaataaccttttcaactgtcctccctgaaaaatgattattatggtgggttcatagatctatttttattgtaatttagtctgtttctctggcgcatgacagtaaatttgttttagaagtaattatatcacatgagctgagtcaagatccgaagagaaatctgctatttcttgaaccatctctatcaacagctttgcatgggaaacaatattcagtcaatgccatcttcatgcatgatggacagctgttatcaacgacaaaaaaataaaaaataaaaaatattaagatattagcttgagaaaaagaaaatttgctaacaaaacaatctctgtatgggatatgcattctgcattcatcaatgtgatgattaagcatattttcaaagagagaaacagaatgtgatattagtattgctagctcttattttttactttttaatgtaaatatacagtttttaaattttaagaaataaaatctaatacaaaactacattcttattttcagctcttgattttggctttcttgtcttttgtcagtaataacaatatgacctaccaacccccaaatactctaggtccattgcacttcacactgtttaacaaacaggactgctgggctctccctggctttatagtgttgatcattatgccaggcaagctttcaggtcagctgtctctcctaccacccttttcctcctgcattgccctgaacacatgccaatacttgcacatgcatacagtctacatgaatagtgcttcccaagtgcttaatgtttactgaacaaacaaatgaatgagtgactgaataaaggtatattatggatgcactcttgatttgctacataatgaaattgaagtctataataagcactgtgattaaccaccttttatttgtgggctaactcattcctttagctgctttgtaagaatagtagttgcaaatgatctctctgtttccttcctcctccatactatttccaaattctgtttgataatctggcattaacagactgttacttcctttgttctggaaactactttcttcaaacaaaaaatatcaatccctctttgcatgacctttcattctcagcctctcaaatgtggctacctttactatcagacaacaaaaattattctcattaaaaccaacaataaccttccaattgctaaattcaaccatctgtattcatctatattcagtcctacataactttcctgcagcacttggcactgttcatcgtatctccctctttctagaaacgctaattctgatatctatatattccactctcgacatcgtctagcaatcctctggccattcctgctctttcatgttctttgcacatcccatatgtgttggggatcccagagctatgaccttctaattgtggaaaaattactctcccttggagatacactcccatagctttaattttatgcagatttcaactatgcctttagctttcatctattttccaacctgtaagccaaaatttctaattgtttactggaacaataaactttgagactgcacagctccaacttaatattgacaacaaaattcataacacacacacacacacacacactattctacacatacttctatcacagaggaattctgttttgtgttcactggcgtggactctggtgtcatactgcttgggcttaaatattggctcttgcattgccagttgtatgactttggacaaattacctaacctccttgtgcttcagtttctcacatgtatagtgggaatcataacagcttctcctttttaagagtgttttcaagattaaaaggggtagttcatgtaaaatatttagaatagtgtcaagcacataataatcactataaaggtggccatttttagccatcattgtagttaccacaacataattaacttttaaatctatatagccccaccaaacagtgtgttctataatggtaggaaatatttctctttcgtaagattcccaagtaggtcttgatacatgaaggatttttaatgaaacgtgtgtggaataagtgaaaaccttatctgtattttatgttctcaagttaatgacttcccactataagaacctcagttctactgtcaactaccctctcagtcagtcactgaaatctgttgagtctgcattagggacctctactccttgtctccactgtcactgacaatcttcattttacctgcaatgaactgaatgtttgtgtgccaccagattcatatctcaagcccctaatcccactgtgataatatttggaggtgatacatttaggaggtaattaggtcaccagggagggtccctcacaaatgagattattagtgcccttacaggaagaggccagagagctctcttgtcctctttctgccatgtgaggacacaacaaaagtcagcagtctgtaacatggatgacagccctcaacagaatatgtccatgctgatgccctgatgacacacttccagcctcaagaactatgaaaaataaatctctgttatttataaatgacccagtttatggtacattgtgagagtaggctaaaccgaataagacatctcacttgaactgttaaaattactccctaactggtttctgtaacaagacccttatagatatcatccctagatttcttttttaaacagaaaaaaatcaagcatgtaaattcccaggtttaaagcctctcttggttgcctactgcccagaaaataaaatccaacctccccagttgacattcaagacttttcagactctggttccagcgtacaccatctcctgccacttccctcaaggcttctgccacaccaaatttctaaaatttctaagtgttcatcaaacatgccaggtttctataacctccaagtctttgcataagcttgaaagctttctttttccacttttgtccattttcataatcctaggacagtcttagtcatcctttaagatccaactcaaatgctaacattgctacaagcctttcctgacaccccaagagaatttctcattctcttctcaaagattccacagtgctttgtttctatctcttaacgacatttatcatgttacactgtttttatcgtttacctgtatgtctcctccattaaactacaacaaactcttatcacagtaactatctatctgtctccccctcctaaaaaggctgaccagtctaagtaccaaaaaaatgattactaaactcatcatccaatcaatccactcgctcatcagatattttagcacctactctctatttgatattgtattatagttttagcttaaaaaataaaatgttcctctatataaactaaattataagctggccaaataaaaagatttccttcattttttttcaattacaggaagtaggttaattaaagagaacaagattactgggaggttggttaggagtgtgcagaggaggtgataatgagaatttttttttccatggaagaagtgagattaccaccattagggacattttttatttcactgaagaagtgtgacttccagaaaataaaaggcaagtgctgtgaactcaagacaatgaatttatgtctagcctgagatgccaactatttccaggcatgcttcaaaatcatttgctggggtcaatcttgcctttctcctaaccacttcctatattttccctcctgtttcccccaactatccatgctgaacattttctgtaggaaagcaagattaggcaaggaaaagaggagatgtgaagtttggtggtagggaaatgctttatgaatgacaatgaaggaataatttgttcttgcatgtttttcatcaatcaatgaatgagatttttatccccagtgtgcctcaatgcaaggcattggcttagttttgctgtcaaacagtggtgccacacacaaggacacagagaagagctgtagaggcaaccaggtactttccaccttccctatacttagcaatagatagcaaaggagtccttgtgttcattctgcattgcccttttaggaaaaagatgagacaaattcaaggtaaagtaatttaacagaaagacttgtctacacaaattcctaataaatgaaatggacaaatgtagtcgtggaatggggcctggattaaatgccaagcactgctaaccaactgtgagatctcagctgaggcacttgttttcgctaggtctcagttttcttctctgaaaacaaggaaagtggatcacatggacatccctttctgctttaatcagaggtaaggtctgaataaagtgcagaattctacatttcttcaaacatagcacgtcaggaaaaaatgtgaacacaatgaagtccaagcttagacaaatgataattaaacacataattgacaaataaaaaggcaggtagaattctcattcttccattctaaattacagttcaagctggtgattatttaagcaaaaatgtaacttttaggaggaaattgaattatttcccactgtaaagaatttttaagatggcaaacctaaaattaatcatgccaaggttcctgctcgtgcttaaatatatgcatgactccatgtcattttgtagtgccttcctgtccttgacataattttgttttatatacttaacacaataaactctttcatagaaaggagaaaatgcctgcccttctggagaatcaaattatctaaactgggtccattgttatttccacaaacaagtggaggaattattgctatattccttaacgattacagacagagaatacaatgtttcaggcccttcacctttattccatccctttctcagcaattacagaccgagaatacaatgtttcaagcatttcacctttaatccatccctttctcaccccttgggaaagcccagcattagaaagagtccctagtggttacacttttcacttttgcccccaagaccatcttcgaccttgattgttgggttgttgagttagtcctcaaggtctctatctgcaaagtagcacttgataaccagctgaatctatagcccactaaatttgcttgttcttatttttagacattagttccctaaatgaaataaatgagagtaatattagttacatcaatgacaccactaaagcattcattgagcttcaataataagtgtaacaataacaataaaattttatggctccttttctcagaggaaattagaacactttaccaacattattgtctcattaaacctcatgtctttgaaaaatggtgtagcattgtgtggatggaagggtataagccagagagtgagacagaactgttttccatttacctacctggaaatcatttaggtaatgagtaaatgagataatgtacataaagtacatgcctgcagggtaagtactcaacacataattctctttccttttctatctctctgcccaccagccattctctccctcccactgctcctgcaacatcctgttccccatttttttgttatagagtaatgcatgttgagacaagtttgtcaggttttgtggggaagttttaggttgttttttggcccagtaatattctgatcccctctgagaaaaaaaaatgcacaaaagcttactatccttgtccatctggtatgcatgggcatgttccagctcctagcttcagtaaagtctctagagggtaggacaagtaactcctctctcagcattactcttactaggcaggttcagaagagtcttaaatttgaggcatcataatatctatactttgggccctgggtggaagaaaaaaatctctaagtagagtttattagtctgttctcaagctgctgataaagacgtacctgagactgggtaatttattaaaaaaaaaaaagaagtt

SEQ ID NO: 505 - DNA, 8883 bp, Homo sapiens
gtgtgtaatggtggatgagagctacaaagtaggggtggctgaacacagtctacaggaaatgcccttggctgttgtttattttttctctcctaggaagttgttgtttaaggagcctaattctagttcggagatgcattctaagaggtcttgtctactactttgtctcccaaaagtaatctcaattcggcttgtctgtgtacatttacatgaggaactgaactgttgttttcatagataaatgagagactgagttttctcagctctgaagagaaagggcatttgctcctcccagctgaaaggtgcccctgggtgaccgggggccttgtgggagtgtctggggggttgacccccatgacatacaacaaccccacagggaaatctccaacaaaaattaatttaaaaaaaagactcatccaggaaacacgtataaaaactgatcacctggcattttgaaccctctcagaagtcttagacctctggagagagaaactgagacacgtaagagggtgaaacaacttagtggtgacacattgtggagtctggccacaagcagcacacatcaaaccaccacacaaaaaacctgaggccacagctcagttccccctcttcagaaaaaaagtgagacataatctaatgaggagaaaacaaggagaatgacctccttttgaacactctgtaggttttatgacacctctacttgccagagtttatgtaaaatggaatatggtccttgtacacacttacattagagaaaaagagccctaagtttgacctgcaaactacgttgttcctaaattctttttcgctatttttctcttctgcctgctttaaatctgctgttatttttctcttcagataaaaaccactgtttagatccaacatattcattttgcaagctggtgaatttgtatttatctcatggctaaagttctgaagtaaaaactataaggtgtgtgtgtatttaaaaggactttataatttctataattttatgttcaaatgacaattaaattcatattaatttccctctaacacagactttttctctccataacttacgatgtaaattttgccattagatttttacccgagttgtttcctttaatatacaagtttaagactatttaactgacaagtgcctaagataataaaacaggttgttaagaatttgaaagtctaagataggaaaaaaaaagttttttatgaactgataggaagtacttccactggcatgcctaatacatctatgtatttatgtgttgtatatataatatatatataatatttcactactgaaaatatataaaagaactctaattggcttaagaaaataaaacacttgaatcaaatactttatcaggaaaaaagaaaagactagtcaaatgctctttcaagtttatgtaacaagtaaaatctttaataaattaaccttaacattattggtaaagtaatattagaaatgtcttaataattgccaacatacattgttgtttgcatttattaattaaacaatttcattctatccctgccaaatactataaaggtgtcaaaatttggtataggggttacaaaactataaacacagcccaaaaacagaatgatctttgcttgtgtaatttctttttttttttttgagatggagtctcgctctgtcgcccaggctggagtgcagtggcgcaatcccggctcactgcaagctccgcctcccaggttcacaccattctcctgcctcagcctcctgagtagctgggactacaggtgcccaccaccacgcctggctaattttttgaatttttagtaaagatggggtttcaccatgttatgaaggatggtctcgatctcctgaccttgtgatccgcctgcctcggcttcccaaagtgctaggattacaggcgtgagccactgcacccagccaacttgtgtaatctttaataagatattgatattcatttaataaaaaactatatcttgaatttagtaagattaccataactcctaattttgtgactttagacggtctagtctacaggcagtaaggtttgtttggggaagggtttgttatcatctttgtttcaaagctaaactataaattcctcccaaagttagttcagcccacaccccaaaataaacaaggacaacttggaggttaaaactgagatcactgtctcagttataattttacaatgatggttccataactttaaatgatgattatcacagttttcagaaataatctaggtaaatgacttctgtctaatttaaaatgtatttaaaggttatgtataaaacaagataaaaggaacccagaagtaagaaagatgtgaagaaagttataaaagtaaagaggtttttttttttttcggtaagaaagcgtaaagagaaatgagaaagagtcttgtacggtagatttagtcctaaagtaaaataactgatggtttaagaaagagggatgttcaggacaagccagaaagtccaaacatgttatgaacagtctgtgtaagtcacaataagaaaattcattttttaaaaaagttttatatgatcaagttgtcaattaaagagaaagtataatgatctttctagaaattgggcttgatgttaaaaaaaacacttctacactaaataattggttagaacaatgaaattttcttaagggattgacttactcttaataaattacaagagattttaactttttttagcccaaagttcaactttcattgcatctcgccattttcagttttctttctccttttaaagggcacaaaatagtaatgctctccttcaactcattttcagctcatacttttaaatacaagtacttttaaagtacttgtgacattgagttataggactttgactcctgggactaaaaaggacaccaagtcctgctaaatcttaaacactgacaacaattaaagcctcatcttcaggcccaatagaagatgtcaattaaaataaactacattcctgaagtcacagggccagaaattaaaattattcaactcctcaaggcccagggactatcacagaagaggtgaatatgtgagatttttaagggctgattttgagagataaaataagttcagtttccctataaattaataattaatatcaaagacacactgatacaagaccaatgcataagcccctatgtcagattaacaaggtttttttgaaacattaactgactccttaataaaagttataaaaggtttatggaaattatatcttatggtcaagatttaaaaaaaaaaattttttttgacacagagtctcactctatcacccaggctggagtgcagtggcgtgataatggctcagtgcaacctctgcctcctggttcaagcaattctcctgcctcagcctcccaagtaactgagattataggcacatgccaccatgcccagctaatttttgtatttttagtagagacagggtttcaccatgttggccaggctggtctcaaactcctgacctcaggtgatccacccgcctcagtctcccaaagtgctgggattacaggcttgagtcaccacacctggccgagattaaaattttatagattgcttataaaatttttaaaaacaagggctgggtgcagtggctcacacctgtaatcccagcactttgggaggccaaagtgggtggatcatgatgtcaggagatcgagaccatcctggctaacgtggtaaaactctgtctctactaaaaatacaaaaaattagccaggtgtggtggcaggcgcctgtagtcccagctacttaggaggctgaggcaggagaatggcgtgaaccccagagacgcagcttgcagtgagccaagatcacaccactgcactccatcctgggcgacagagcaagactccgtttcaaaaaaaaaaaaattgtagttgccttcatactgtttattaggacttattgtttggaaaattaagtgtcctctctcaaagaatgaaagtttttgcctttttttgaaatccttgagttatcactttggtcaaatgaatgacttgttttacaatgacctgtgtttttaacctttgatattttacaaaatttccaaaatcaaattataaattttgtctttttctgacctaattaatcctttaagatattaggttccctaaagtcaaaatttaatcctttaagatattgggtttcccaaaagtcctagtttgaattattttatatacaaattatacaggaaacaagtcaaatctaaaatgatatttgactttatctgggctgtatttatataaatatgttattggtatgtgttccaaaattatgggaaattcctataattctgatatgacttagtatacattatcagtaattataattgttatgttaaattattgtgtgccacagaagtaacaaatttccttgtcaattgtatgtcagctatgactgacctaaaactttgtcatccacagacaattgttgtttgctttggtcctctttagaaggtggctttataaacaaccataaagctctaacagatcctcttgaatacaaatttctgataactttggagactgtgacatcagaatagaagaaaaatgtttaagattcatggaaaacggaaatgtttataaatagtgacctaatagaagactgaaataatctttttgacttctgacttaaaactttattgctgatcctttgttttgtttttttcatagtcaaggaaacttttcctttgagctattgacaacttttaacaatttagtatatgcctatgaacaaactttaaaacatatttgtttctctctatctgacttctccagaatttacaaactatttatgagtattcttaacttttgaaaatacagttatttacaaaagtacagtaagaatctattttcatttataacaggacacgactagagaaactggttattttaccaagacttttgactggaatggtgtgctttcctttaaagaatcacacttgacttatggagccaataaaagccccttaggaaaactggcctcataccttgttgacacagtccctgtacaggtcttcagccaggctgacttatgataagtaaagaatgtcactttctgacaggcccaggagccccaagtttatcttggaacctcaagaggagaagaattcactcaactcataggtatttgatggtacaaatccatgactgggcttggcttttaaaaactcttatctaagtttctttctatggaacaaagttccatcaaagccaatttaaaagcctatgttaaaaaatttttcttgctatactatatgcaaataatcaggccaagtataataaaacaaatcagtcctaccatgatttgtctttaataaaaatggtaaactagacagagaaaaattatatttcaaaaactatggtacacctgttattagattctagtcttgcctaatgttgttcgatttttattattttctacagttcagaccaaattctaatttttcttggctacaagtcttcaaaataatgttttcaattttttcttcccccacatctttcccagtttagagtcactgaaaactaagctgtgctttcataaaaccctacgaactgaaactagacaacttaaacttcagaagaaaataatagcaacctatttacatacataagccactttcatacctgcctactaaagtatggacttcagagtaatatggcctataccaattttccaatattgttcttttgtttttgtttttctcccttcctccccctactttatcttcataggacatgagacttcacaacttactaaaaatgaactttcctagtaactcaagacctacccatctaaaaataaaccatcctagccatgaaacatcagacaaaacctgagagcagattaattttctcctaaaatgttttctccaaaagattttaaaaaagaaaaggggggatgtgaaatgaaaataaaccttgggacccccaaaatcactaaagggaaaagccaaactgagaactgcttaggacaaacctgattctattcaaagtcactgctctactcactgagatatatacatatctgattgcctcatttggagaggctaatcagaaactcaatagaatacaaccatttgtctcctatctacctatgacctggaagcccctccccactttgagttgtcctgccttcgactcaagttgtctcacctttccagactgaaccagtatatatcttaaacatattgattgatgtctcatgtctccctaaaatatataaaaccacactgtgcccctaacaccttggacccatgtcatcagaacctcctgagactgtgtcacggacacacatcctcaaccttgacaaaataaactttctaagctaactgagacctatctcagatttttggggtccacagtacctatcagcagtttcttgggatgagaaagaagagagggacgggaatttggagctggtgagaaagataaccgttgtttggataacacagactaattccagtcacttcaacctttgtgacttggtttttcctaacagaagtggagttaacgtccaacaccatctgaagatggaaaacacttagtttagaatgtgctttcccactttatatttcacattaagtaagcattttactttgacatttctcaatcttcagcctctctttcttcctgttacttctttgtggtcttcagccaggctggaaaacttggtcttcctcggatgtgtccctgtgttttccagcctccaccccactgttcatctgtcacttctacctaccatgctgacactcaacagcactcttcagatcctatccatcctgtaaggctcctccccaagtgccagctcccttatctgtgttccacacacacttactaagttcctcctcccactgagaacattggcactctctgccgtcaggccctgtatcacatgttgctacatgtcattagtgtccttgtttaatgttagagagacaaccagagtagtaaaaataagctgttctgagaatcatttacccaacgctctaatcctagctccacttggacatgagacatatggagcaagtcatattttcacactgctctcagcttcttgttgctgtgtgtgtgtgtgtgtgtgtgtgtgtgtgtgtgtgtaagacagagagagaggggagggagggaagaagggggagatgggggatgagagggagagggaggagagagggaggcttgaggtgagattcaaaaagttttcctggttctaataattgagaaatacttcctcctcaacactctcccaccgcaggattgtgagtccctttacaataaagtctgcatcattttcatctgagttcccacagcaaacaaggcttgcacttagaccacttagacactcaatacatttatccaaccaatatcttgttttatccttacagtgccctgagacagtgactccagccacagacccaagccttgggaggtacaaggtggcctgccaggcccacacagttaagaacaagccaaagaaagactaattagaggagaatgtccagggaatgcacaaaggactacttaatgcaagtactcccatagagggtcctaccagccctacaggctctagagcaggggttctccactgggggtaatcttgccctccagaggacattcagcaatgcctgaacatttttggttgtcacaactgggagggagggagcaactggcatgtagcagatagaggccgtagaggctgcttaacatcctacaatgcacagaaccccacaacaaagagttaaccagccccaacatgtcaacagggctatggttgagaagctctgttctatatatcctcactacacatcatgcaccttctctcctctcccatctttccttaatctcattttcccctttgtttcccaagataagcaacagattctagatgatattaccggaatatgggagctgtggtatgacacacgtgaacactcaaacttacttccttgtcatgaaggcgtaaaattcagtcaagatttcagaaaatctccttacatcttttgaatcttcccagcttttgagggggaagattttcctgattgttttctaccaatttcttatgccacggggtgaagttgggtgggcaggaggaaggaaccagggtgcctacccctcctaagtaatattagaaatacagagcatcatttgacgaaaactgatctatgccactcttcaaagttacaaaacagactaggtggcaaatatccgctttacaagaaaaggagagggcgtttaagaatcagtttaggccaggcgcagtggctcatgtctataattccaacactttgggaggccaacataggaggattgcttgagcccaggagttcaagaccagcctgggaaacgtagtgagaccctatctaaaaaaaataaaaacccactaaaacagacaagcaaattagctaggcatggtggcgtgggcttatagtctcatctacttgggaggttgaggtggaagaatcatttgagcccaggagatggaggctgcagtgagctatgattgcaacaatgcactatagtctgggtgacagagcaagaccccatctcaaaaaaaaggaaaaagaatcagtttacagatttacagattgcctgtcaacagatacgagagcgagagagacattcattaagagctcaggtgttcagagctgctgccaacagaaagaaaacgaagcgagagaagacagcagccattagcagatccaatttagaaaagctgttggcacataacttttcaggaacactatgtgtgaaggactcctgtatcacagtaagttgaagtcaagatgatacccagggccgctaacatgatacctctcttggccattctaagcttctacaaagagtgcaccaactcacttgctttaggattttcc

SEQ ID NO: 506 - DNA, 22391 bp, Homo sapiens
tttggaaacgtacctgatagctgcagcctctactatgtttcaaatgacaaacttcttaatagccttgtacttggccatgcatcgggcacagttcctgccacaaataggctgtacgtggctatggccttttttggcatgaccattattccttcttttcttttgcgttttggaagcaagggcccaggagagtttctgagaagtaacatgatcagagttcctcttcaggaaaaaacaatgtccaactgctgaacaactagacagagtaattaactcactctggcaaagaataacatcctttattatgggatactatgggctgaattgtgttccccgaactcatgttgaagctctaatcccactatctctgcatgtgctcctgtttgcagatggggcctctaaagatgtgattacgttaaaatgaagccttcagggtgagcccccatccaatctgactgaggtctttataagaagaggaaacctggacatacaaagagacaacagagacacaagcacagtggaaagatcttgtgaagaggcagctagagagtggccatcgacaagccaaggagaggggcctcggaagaaactaaacctgccaaaacctgatcttggacttccagcctccagaactataagaagataaatttctattgttcgagccacccagactgtggtatgtttgttatggcagccttagcaaactaatacagatgagctcagttagacagcagttgcagtagtcagggttagaactagacaagctgcagcaagattgcagtgaccggcacaagtgtgaatgtgctgcagaaatgaaatggacagggcctgagaagagaagtgaggagtggggaaaacgacatagtagaaattcactctaacacctgggcctggttggcaaggaagatggtgataccatttgaaaatacaggagagtcaataaaggaaagaggagtttaatttttagacacttttccggacgtgtcttgctacatgctttcttggtatctctttatctatcttggtctttattccctcacatagtagacactcagaaaattattgattaatggacaatctcactcaatgaagaaaattaaacccaagcccatctgcttttgttgttgttgttgttgttttaaaatcttacaccacatgtccttaaatactgaaaagataccctcgattttttctggaagagcctaactatactttgaaaacatccttttagttatctttatgacagtggtcccataagactataatgtcatatttttactgtaccttttcaatgtttagatatgcttaaatacacaaataccactgtgttacatgatcatgtgtcacttaactatggggatacattctgagaaatgcatccttaggtaatttcatcattgtgtgaacatcatagagtgtacttacacaatcctagatgatggtatagcttattgctcccgggctgcaaacctgtacagcacattactgtactgaatactgtaggtaactgtaacatggtgctaagtatttgtgttacctaaacatagaaaagatacagttaaaatacagtattataatcctatgggaccaccatcatacatgaggtctgcaattaaccgaaacatcatgatgcagtgcatggctgtatggtattcattcttaattacatgctacgctatttttgtatatgccactcaaaaatcttaagaagcccttaaatactaaagaagaattgtctcatactaaatcatgacagaagtctttcctaaacaaaggagagtggaatagacgaaggggcagaggaatagatggcacacacttcaactttgctggacatggcaaagcctctgaaagagtttaaattatttgcttaaatcattatttctgttcaaatttctgctagtttgtccatgcggaattctggccatgaacttgtattctaaacactaagaagtctagaatgcacaatcaccagttgttatggacaaagagatcatgttttgaaaagccaataggaaaaaaactattttcttacttgtcaaatgaagataacaacacctgcttcataagtttgtatttaagattaaacagatattatttataaagctggcatagagcatgttctcaaaaatttcactcactcattcattcaataagtacttggtaaatatcagggtcctaggaacatagtgcagtggtaaaggccaaacacctgacccttcctctaccacagagcaaagggactctgcctagtcaccatggcagtctccctcattgtctggacagagctggacagatcccatgaatacttcagggctttcataccaccctccaaaaaataatctatgtctcacttttctcatcctttaacagctgagggtgtctctgtaattcgttatttttcaatccaacaccttctgtctatgtctttatacattagtacactcaattaaaacagttaacaaaattatcttcccaatctcacttcaattatactcccattactgagttcagagtaatgtagatatatataaatatgtaaggagaactaacacttagaaacacattcaaaatagaatatttctcttttcacttagctttttttaaataaatgccttaccccaaagaagataaggaaataatgttaataagtcttacatttaaaggtaaaatatgactcggagaaaagcttagatgaaaagttaacagaagaggacccacaatgcaaaatgcaagatgataccatcccagaatcagaatttccaaaatcaaagggacctttttctcttgagtccccatccaattcaagtagtcatccagccagtgagtaaatgacacctctccccaacacacaaacacacacaccccatctccaaatgagccaacactagaaatagctataagacgaaaggtcaaatgacacttggtagaataaaaaaaaaatctaggcaagaaaagtaacataattaatagaaaaagtaagaatacatgaagacatgcagcaagtattggattaaaagatatatagcaggcagtagaaagattatttgcatttctaattcaaaagcaaagtgtttatcaagtgatatgtttccaaaagtaattttttaaatggaagcattatttgaccgttttaatctcttccatttcctattgatgtaaggccacctaaaaacttatgaattgttttctatttacaaaatgattcagcttagaaaggagtagaatgagactggtcattcagtaatttctcccacccacccttgcagacatcacatcacaaagactgtgactcactttgtcatacaatttctatcctcttaagagtttttcagattgttgtgatgaatactgggtcataaatctgaataaattttcagatgaaactatccatgccatttcatcacagcccaaaatattaacaatggtaccagacagtccccaatactaacttttacaatgattcactggttttagacctgagtaagagagagacacactgacgtaaggattgaagtgtctgaatcaggtatgaattcccaggtctgcgttccttaattagagtactataaccagttctagaactgagcattaatgttggctagaaatattaatatgttacttaacagctgaaaagtttccaaaataaaaagtgatccaacaaatgactacgctttgcctttattgcttcccttgaataatgttaaaggtgtttgcagaaaagaactacagtgctgttgcattcaatttaccattttatatgcctcatactatagtatttatacttatttgaagttgttgcccattcaacaaatatagagtgaaccttttcatgggactcagactggtcactcattcagcaatgaagccaaaaggaccctgggatgagtaaattcagcctcagaccctcagaataggaaagagtaaagaactactgggtaatgtggtctggattttttaaaaataaaaatttcttgccagctaggaatttccagtaaaactgggggacataaaattaaaatacaacaagctattagagagaatttttagatagcacacagaaaaggaaagatggatacaggatgatgtgaaagaaataaggcccaaagcatgactggaaatgggataaggtacgaggacagacaggacatttcagcttaaggaaaactgcctggttaaaggctaagatgacaaggaagacaggagacgtgaagggaaggtcagaaaggaagttaagagacttggctaatttattgagtacatcttcaatttaacaaacattctttgagtggccactgtgtgtgaggatagatgcagcaaatgggatccagtgcttgcctacaaagagttcacagtcccagtgcagaagccagacacataaaccactaactattacagaaagcatgaagttctgtgttcagactatgtaccaagtatatgggaaaacagtaaaaaccattaattctccctgggaaggtagaggaaagtttcacaaagaagtctgttgggctggatcttaaaggatttttccagagaaaggtgaggatgggaggagttgtgagagagaaattgataagaaaaagaaggatttttcaaaaacaagagtcacatgaagaaaggccaatcattgtgacagtaatcgttatgacacattaaagagactataattaaagcacagagtgctacagcttcaggaaggtatggatggtaaacagtaagaaataaggtaggtcatgtttaagaaggaaagccaggtaggtctggttagtgcttaaaattgcaggagagtagaggtcattaaatcaagaggcagggcaaggaaatcactatggctgggaaacattttagagagatatatacgaaagaagtagagaaaggcatcaaagacaattccatggtgtctagctttggagacaagaataataattcactacaagcagaaattcaggaggaaagggtgctagtttgagaaaatggtgttaagttctgttttatgtatgttaagttgaagctatggcagtgtgtctgccctccaagcagtgggaaattgagatggggaatcaagacagagacagagacaatacatgatcttctgaaggaatacaagtacacagaaagaagagtagaaggctaaaaacagaaccttgggggaatacaaatgcaaaaaaaaaacagaagaaagtggaaaaaaagacagttggatgggcaaaagtataaccgcctgaggagttcttccagcctgctgcacaaggaaagaccacagcattgcagtaaagaaagagtttaataaacacaaggccggcaaagccacatgggagatagagttagtactcaaaccaatctcatccacagctcatgggataggagtttttcaacagcagtttgggggaaagggtgaggattgctatgcaatgggtgcttactgataattcattgggctgaagatgaaataatagggggtcaaagttgtcctcttgagtggaaccattcctgggtggggccacaggagtggtttagcaggtccagctggagccatgggtgtcagacatgcaaaaaacctgaaaagatatctcaaaaggccaatctacaatagtggtgttatctgcaccactattggtgcactagtggcaatctattaatacgtctacaccttagcacaactcagattcctgtcctcccctgaagcctgagggcctttcattagctttataaaggcagttgagttttggggaaggcttattatcctttaaactatctcccaaagttatctgggcctaagcccagaaatgattaaggcagcttgaaagctaaaggcaagaggaggggagtgggctaggtcatatctctggcagtgtcataattttctcagatataacttttgcaaaggcagtttcaaaaggagaaccaggttgatgtgatgtaatagaagccaaggaattatcaagaagtcagaggcagacaatactgccacatgtcagagtagcatgaaaaattggaaaaggccacatgattaaattagaagactactggtgctctcataagaatgatttaagtggaatactgagggcagaatctagaatttaaaagagttcaaaaaaagaaaaggagatgatgtagaagaacgtactgattccaggatattattcacaaaagaaaataagaatgaaaaacaatgcacagcatacctgagaaagttttatattgcatagtgagacaggacagccaagtataaaggggtccctggagaacctccaaatggcctgcacactgggagaatggggtggagccacagaagttcacgccctttgcagggaggagactggtctctcctgttcggggtggtaacttgggaatcaatctgtgagatgggggcctgttaatatgaacccctattgctttgctgtgttgtttttccttttttctttctgaccaataaattccataacccctcaccctccaaagtgtctgtgagcctaatctttcctgggcgtgtgacaagaaccaggattttcctacaacaatagtacatgataaaaatcttaaatacttttaaggaaatcagaattcccaataaaagttctaaacaatttttcctgaaaaatgattcatctttctctagattattctaagaaaaactaatagccagtctccaaaattccgaaatgtttcccaaatataactttgctatatataattatcttcatttaaagattgaccaagtatctaaacacagatgtcaagacaccaagaaaactgtaaactttgaccaagctttatacagcatatgcctcatgagtagttatttcacagcaagttccacagagaatgttttcctcatcagctgacatttagtgagcactctctgagtaaaaagtactgagctttttatgatgtttatttatataaagaagtcatggttcctaccttaaggtgccagcatcttaaggtgcctaaattatgaacagagaataatctgttcacagaatgcagccagatcattactactctgtacaaatttcttttaaaaaatacttttttcttggctaatttgagttatcatttaattacaagttttcattataaattaatgtatagcttaattataaattaaaccaggatcattcctttcaattgttcaattatatctggaacatacacttaatattcacatagcttctcttcaatttttaaatctccaaaataccttgaaaatctgtgaacttttcatttcagaattctattggataattcatcttagaggttaaattgcagaagtcaatagctctataaaaatacaaatacacacatacacacacacacacacacacacatccattatacatttctgtaaatgagtaagtatcaaagatacaccggtcaagtcaaaagtcaccttgtgcaggaagagtgacagaagacagctggatgagacataaacactgaatattggctgtctgttgcctccaggcccttccaatttcttcaaactaaaaatattctgaaggtgtttagaatgagactggtctggcttctaagaaccacagtctatggctcaaagggtgagttcccctggaagttgccacttttcttttcctcctctcctaaattcctgtggctatacataacctagcttaaaaggccttgttggcggtcattattaaagggagaaaagagaaagcaggagctaactgaacagtggatacaacaaggaaacacttaaaatcacagtgccataagtgcattttctaatgatccagctaaaactctacactgataatcattattccaaattattatgcaaacaatcaagcattaactatttattgagcactgacaatatacaaattaagtactagaccagatcctaatttcagagcacagaaaaggacaaactcaaaaataaaacagaacaaaatacatttgtttggacagaatatcctgatgaggttaagatttgtgccccaggctgggcacggtggctcacgcctgtaatcacagcactttgggaggctgaggtggacagataacctgaggtctggagttcgagaccagccaggaaaattcatggtgaaatcccgtctctactaaaaatgcaaaaattagctgggtgcggtggcaggtgcttgtaatcacagctgaagcagaagaattgcttgaacccaggaaggagaggttgtagtgagctgagattgtgccactgcactccagcctaggtgacagggtaagactgtgtctcaaaaagaaaaaaagaaaaagatatgtgccccaaagatacagatttgccttgctccgtttcatggtcatagacttttatcccatgccagccttcttacagacgtgtgctacgggacataggggcccaagtagggtatctggaaaatcaacaaacactagaattggaaaaacaagcaaagactacagcacatgtgtaattaccagcttgtacaggcatctcgtggttttaaaatagtagttccaataatgtgagaccttaaattgtcttttcaacatcactgatgatgagttctcagaatcagtgtatagatgaagaaagtcaattttatgcttatgatatttaaagaaccgttcttgttttgttcattacatctgtaacattttattttctaattaaactttaaaattatgtccttccacataaaatggcatcataaatcaaaatgagaatacttaaaacccaattgttacaccattgtcaaagtctaattacataacggtcattttataaacaaatgaaacccctcagggcatgtcatgaggggatattgccttttctaggctgaagtcacttggcatcaaactcatcttaaaaggctcctaaggtgtggtaatatctatgactcatgaattgtcctttcattgctgtactgattacatgatttccaagattaaatgagctattagattctgacttcatttgtttactgcacccaatatttattacagtaaatatcacgttcattaagtaaaattattgctatccacttgccagatattaccaaagagaggtggggggagagaatctagtacgtgtattattaaatcaatggttctatttaccccaaaggcagtagtgaagagatggaaaggtggctttatccaaaaccccaggaaatcaacctgaggcacccgtaaactagtaagaactcttcaaaggggctagcagctcactaccctgaaatggaggaagcctaaccaaagtggggtccagcagggcacactctatggtggaatgaagagcgcactgaggctgagggatggcaggaagagaaggcaagggaccaggtggtaagaagctcattcaggataaaaaaagaggaaacccacaagtgaacttgagtaattggtgacttttctgagcttcagtatcctcttctgtaaaaagagatgggtaaaccagaaggtctgaagcctccctttgatttcacaagtccatgtttttatgcttggggttgcatggaacacatgcagtagcaaagagcccaggggtcaggcccacctacaagccacccctgctccacactggggtgggcaggtctgcctttccaagtctcagcgtcctctggagcctgcaagcaaagaagtgtggcacacaggcagtcacctcctgggagaagcccaagggtagatacagtacttctaactactctcattttttttttttttttttttttttgtaaataagagcacctggaataaattgaatactaagtgtacataagcagcatacatttcacttactatactctaccacatgttgtacgtgctgcttgggataaagtgttctctcttctgaatgtttttacacagcttgctactttagagtacatacttaatattatccattcccaccgcattgaaagaggcctgccaaaagttaaggatgccaaaagaaaggcaggagtgcagcgcacatgctggagaaggagaaactctctaaccacttttaacatcttgtttttatcaagactctcatgtcaaatgaagattattccaggactatgagaaaaacgccagaaaatgggcccttttgagtgcaaattcaggagaatgcccaggtgtgaagcacagttgaccttcagcaacactgaaaaattggaaacatttgtgttgtgtcatcttctcctacctcttcttttagaaaattttcctctctttcctacctcacagcttcccactctgcctcctcttcccctgcacctctccaggaccccatcatttatatcacagtcttcaaagcatccctccccaaactccagtccttctggccagcttttggggaagaaattgcactcacaatttaatccatactaaatgttaaaatctgataatggttgaacttggcctttcaaaagttacctgcagtttagaaaacatgtaggcacaaagtgtcatgccaaaggaaaaaaaattccagtgacagatgttcaggtcagttggacaaaacagtctgaggaatgagaccatagatttttcaacttttcaaacaggtctagaaatctgagccataatgtagtaggaaactgtggctactattaactcttctccatgttttctggtcagttttatttgttttggggggtctcctcatggtttggtcaactatcagtaaacatccaatatgtgagaaaataatatactgtacttaaatttatgtccaggttgggctacatagaaatagatgaaatttgtcatttttagatttgtattcttgtcagtctattgcctggtacaggtatcctttaaaaaaagagtagtctctttggggacttgggaagaaagggtgggaagttggggagggacaggactacaaactggattcagtgtatactgcttgggtgatgggtgcaacaaaatttcacaaatcaccactaaagaacttactcatgtaaccaactaccacctggtccctaaaaccctatagaaataaaaaattttaaaaaaattggtagtctccacaagtctggatgagttattctacatttcccttttaatgtcttgtccttagctagttataaagttagcagagttctcaacctgagtactagtgacatttggggtcaaaaatgtttttgttgagggtattataatgtgtattgtaggatgttcagcagcatccccggcctctacctgccagatgccagtagcacccttccaggttacagcaaccaaaaatgtctccaggcattgtcaaatgtcccctgggaggcaaaatcgtccccatttgagaaccacagagttaaagtaagattacaaaaatgaaaacccaactcacagttaggaagaaaaagttaacggttgtttttacaacggtggtaatgtggtatgcaattcaaaattatgtccactggctaacctctacatagttttattctaaggcgaatcgggtatcaaaatcttcaaagaaaaaatgattcagcaactaatagagtctgaaaaaaaaagagtattaggggaagccccaaatattaatttaatttaaagggaaattcttctgtcttctggtcataatacatgctttttaataaataatttgtgatactagaaagaacaaaaccaattgggacacacagcaccttgcccttgtcagctgagatggcgtagcagacaactgcagaacaaacttcaatcacaaagataattttttgaaatagatgagttcaagttaccagaatagagaactagcactaacccatctaataggttacaagcatcttttcagttttacgggattaagtgattgataaaatttttaaattatggcaagcctgaaaaaaattaaatacttgcctctcttgcaggttgctattttggaagcaataaagactcagctcatatgaaagtgtattgcccattcttctgccaattcacgtttggttgtagaattttcttctcttccagcccccctccacctcccctcatgacatcccattagcatcccaagacaaaggcagaactacaggggagtggcgctgggacccctgtgggtcttttctcaggcaatgagagaatcagattctccacctggaacccataaaggaaggaacgccataacacacagcttttaaaacacatgtttacatacacttacaggaggacaggttacaatatattctagtcctctttctctcacttcaaattccatcagtgttgtaaatcggctcatcttatgcccctttctttctctttcctctagaccagtggctctcaaagtgtgatgtgatcagcatccccggggaacatgttagaaatgcaaatcttcagcccccactccagacttagggaatcccctaaagtccaagcactccttatttaggccagtgttctttctagaaccacaaacattgtttcttacagaaagcaaaactgcaattctcatttcatcctcaagcctgctgcaaggtagtaatatattagccccacgtgagcgatgaggaaaccggctctggggttaagcgtcggctcaaggtctcaaagctagtcactgcaggtggaagattaaagtgtttgcacttcttttcactactgaaacaaagctatggcactttattaacaacatctggattttttgctggttggctggttggtttttgtttttgctctttcagctttcgtcaattcggaaaaatataaaacagagtgggtgagagtagtgtgccatatgcctcgggtcgtcccgagtcggaatttaagggcaggactctagaaaggtgtttttccagtaaagaccgtttcgttctgctgcggtccttcctgtctttgtccccgggacagcacgcagcagatagaagcggccagagctgcatggcggggccgcgggcatccccgacgcgacaggttgtccgcgggaagacagccagtccgcgaggccccggcgcgccgcggctccgggccgggggtactggtttacagggcaaattggcacaccccaaagcccaggggacacccgggcctacgccgcagcccggaaaggagggggtgagtggtgaacccgaaaccgccgagggccgcgcggccagaaaccacacggagcgctagggtcgcagtgaagatccgggaggagggtgcaggctggaggggagagagcgggcgagaacccacgaaatggaaatgaggcggagagagcgggtcggcactcactgtgagggtcgctcttctcccggaccccgtcaactcggccgtcggggtggatgcgcaggaagaagcccccgtttttgcagtacagccgcttggggtccttgaagtggccgggcgggaaggcgccgctgccgccatcctcgggcaaggcgggcagcgtggtgatgctcccggctgccatggtccctgcggggcccggccgggatccccgagccgctggagccgcgcggggagccgccgtcccccggccccggccccggcctccgacccgctccggggcacggccccggccccggccccccagcctcccgcccggcagcgcgcggccgcgcccgcggtcccccagcctcgagccgctcggccgctcttctgtccgccggcccctggtgcgcggcgagccggcggcccgggacctggggttcacggatgggtgtctccgcggacgccgcctggggagagccgcctcccaagctgcagcgcccgggatcccgttgcaaccgcgggcaccgcgtccgctaatctggcacccgccgggccgcggcgtcacatcttctacatctccaccccccacacccaccagcctcccgcgcccccagttctcctccctcctgcgcgccgccccctactcgctcgggttttctggggccggcctctgagttcggcggttcggccacaacacgcaagcgcgcgacatcagtccggcggggagcccggcctcagtcgggggcgggggagaggcgaggggcggggggcgcgcgtcggaggccgcggcagggctttggcattccctgggctccaccgccccttatcccccaaaagtcacccccgcccaacccccgcaccacccaaaccacgtttaggctttctccacactgcggggcttttgctgcgcaaccagccgtgactcaacttttaaaagtttaaactcaactttctcccccattttttccccgctagcgtttcaaaacggagaagccgtttccaccccaaagtagagaagttgcaatccaaggaagagtctgtgtcagagcaggctttgaaaatctctaaatcaccaaaagacgaggggtacaagtggggcataaactttaaaattaaaggacagaggctgaagtcgtctaccaacaaaaggagagaaagaggccagagaaggggagcagattgggttgctaaaacgaaaaggtttcctttactgacctatcttgaattagacgacgcagaaagatgaggatggggataaggataaatccttatcgcgatcgaagcgcattaatgtcttaactcggacctggcatttgccctagctaaattgttatgcatttcttggagagagagttattttctgtaaatcccaaatgtaaaattgaagttaattgcattttggtaattttcagtaggatatagcaggtgccacagatgactaggaaaatatctattcagaaaacttgcatgtattgagtacctactgtgtgcaacacataatgttgagtgtgtgggagatgccaaatctgatgccagcgtctcacacactgagggagataagatgggtagcatgagtaacacaaatagcagtagaaagtaggccatagaagagtaagactaagtgctgtgacatttcagacatcggataactcagcgtggggaggcaggagatttggggaagcttctagaaggagttgcaagtatggacgtgcctccttgtagaaacattaggtttcaaaaggccatgcataagtgcatttgttcttaagtctccaagaaggctttaactccagatgcatttctagaatgttacatacaggagaatgagtaaattctttgaagctttaaaaccaggcatactgtttttatttttattatttatttattttttttagacagagttttgctcttgttgcccaggctggagatcaatggcacgatctcggctcaccgcaacctccacctcctgggttcaagcgattctcctacttcagcctaccgaatagctgggattacaggcatgcgccaccaccacgcagggctaattttttgtatttttagtagagacggggtttctccatgttggtcaggctggtctcgaactcccaacctcaggtgatctgcccgcctcagcctcccatagtactgggattacaggcgtgagccaccgcgccaggcccaaaaccaggcatattcttctttcttcttgcagttggtatatgttctatagaggaggaaaaaaaaaatttccccattcattactaggtttatggctgaagcccctgtaacaaaagacacattaacaagagaaaaacatactaacttatttatgtgagttttacacaaaacaggagacttcagaaattaagacccaaagttaagagggaagcctgtgtatttttaaggctaggattgataaagaagtggaagtcatggagaagtatgattggacaaatctgtgatctaatggtaataaactggggggacttacttagcaaggcctatttgctcagattcttttccctgtccgtgtgtcttcagagataaggatgtctgtttcctccaggtatagggaaggcacctctggaatgaaggtcttatggtctgcctcagaagagaagatctggggaaagtgaaagtaaccctcttgcttctgctcttttcttaagtgccaaggtaccattatttttgggtagcatgtcctgaacgccatcagttctctaacatctctctccaaaatggatttgtttcatcttcattgaagatccgtctgttgagacaaaatcactccctccagatgatctctgtaggtgctactgtggtgctgagtagtccctagaatgattgaactctcacttgaactctgtgtcacagaaacctgaggattccaggagcacggggataaaatctaagtcatgatattttttaacaatggcatccagaaacctggggagcagctacacgcagtaaaataacttgtattccctacaattcaaacaaataatctaattttcaaatgggaaaagatttgaacagacacttctccaaagaaaatatacaaatagccaataaacacatgacaaggggctcaacatcattagacattagagaaatacaaatcaaaacaacaatgagatactactttacacccactaggatagctataattaagaaataacaacaacaaaaaataataagtgttgaagatgtggtaaaagtggaaccctcaaacattgctggtggaaaggtaaaatgatgtagtcaatataaaaacagtctgacagttaactctaaaattaaacagagtcaccagacaacccagcaattccactcctaggtatgtagccaagagaattggaaacatatattcacatgaaaacatgtacataaatgttcatagcagctttattcataataaccaaaatgtggaaacaagccagatgtccatcaaatgatgaatggataaatcaattgtggtatatccatacaatgaaatgttatttggcaataaacagaaatgaattactgatacgtgctacaacatggatgaagcttggaaacattatgctcagtggaaaaagacagaaaaggccaggtgttatatgattccatttatatgagatgcctagggtaggcaaatccatagaaacagaaagcagcttagtggttgccagggctgaaggagagggaaatgggcagtgactgctaatgagtatgggatttcctttgggacctataaaagagttccggaattagatagtggtgatggttattacacaactttgtgaatatactgaaaaccattgaattgaacactttaaaatggtgaatttcatgatacatgaattgtatcttcaaaaaaagagaaagaaaaataatagatgtcaaaatgaaaatgagtttttttctcccataaagtcgggaggaaaaagatatcatccagtgctattaaggatgaggtgaaccaaagaccttatcgacagtcagagggaggctaaattatacagcattttgggaaaactattttaaaaggtacatcacagttttaatttttgattttttttcttttttgagacagggtctcgctctgtcaacccaagctggtgtgcattggcagaatcgtgggtcactgtaacctcgacctcctgggctcaggtggtcctcctacctcagcctcccaggtttgctgggactacaggcgcatgccaccatgcctggctaatcttttgtatattttatagagacaggtttcaccatgttgcccaggttggtctcaaactcctggggtcatgcgatctgccagtctcagcatgccaaagtgctgggattacaggcatgtgtcaccatgactggcccaatttttgaaatttaaataaccatttgaggcaacagttttgatgtaagaaatttattctcaagaaacgattatagatgtacacaagatttattaacctggatgttcattatatccttgatcataatgaggaaaaataagggataatctaggtgattaatgtgaataaattacattatattcattcgaagtagtacgttccatgtagccaaataaacagttttgtgggagaatatataataacatgaaaaaaattcttgcaatattgtatattgttaattgaaagaagtaggttacaaaactgtataatagtatctcatttatttaatatgctttcatacacataatagaatgagaaacactaaagtatttgtagtgatattttggaaggtagaattttttatgcaaacaactaattactcactatcacataaacttatcatctaaaattgtatcttgtttgtttttgtatttattatcagtttccttcccctaatataatacaagaaaacttagagcagagatctttctgacctgtacattgctgtatcccaaggacctaatggcactaagtggggcctcagtaagttggtttgcttgtttgtttcttttttgacaaatgaaggaatgcattattttcatcaccgaaaactgtttttgaaagctaagttcatcatctacattatggaagggcaggtatcagtgtagtcaatgtctgtggaagtctttcttttaaccatttcataatgaaaatcacattaaacccatttccttatgaaaatctcacaaaaaatgcacaaattactgttttctaaaacctagtacatcaaaaataatcttattagttctccagatcatcatcatactatcaggtatgaaataatagagtgaaccactctattttatcttcacaagaggtagtaaagattactgtctaacttttgtgctcagatgacagattctaatgtcacctaattgtgctttagcacagaaaattatttaggtgacttgtgtccttgacttttaaaaacaaataaacaataacaaacatacaaaacttccagaaatatccaatggcttttgttgcatttggctattttatttttaaatattgtattgtcactcgaatagatcaccacgcttcaattatttattgttctcagaaggtgagtggcctcctgctgtgcatattaccactggaatggcaattccatctcctgtcagatcagcagtggtattaaatactcacaggaggctgggcgcagtggctcacacctgtaaactcagcactttggaaggccaagcggggcgaatcatctgaggtcaggagttcgagaccagcctggccaacatggtgaaaccctgtctctactaaaaatacaaaaattagccaggcgtggtggcgcactcctgtaatccagctactctggaagttaagatgggagaatctcttgaactcaggaggtagaatggcccgagaccatgccactacattctagcctgggcaacagagtaagactccatctcaaaaaaaaaatactcataggagcattaaccttattgtcaactgcacatgtgagggatgtaggttacgcactccctatgagaatctaatgcctgattatctgaagtggagctgaggcagagatactggtgctggggagtggctgcaaatacagattaacattggcagagagatttggctgcacagagaccataataaatcaattgcatgcagactcataccaaaaccctatcagtgagtggcaagggacaagctgcatctggtggcaggctttaagtcagactctgaaacttattttagtccatgcatggccttcccattattttatttaccactttggtccttgcctctttcctgcactgcatacttgtctcaggcacagttttggtaaacccacaggctaaccctagccaaaatgagtgaaaaacaaacgtcactggaaaggttctttgaaaagggggaaagaccgagtgatgtgacagcagaaggctctaagactgccaacagaaagaaagctgcatttaaaagaaaataccaagagtctgacttaaattacaagctcattgcaacagggtattgacattctctgagcccactttgtataatatgtggtgactggctatccaacgaagccacgtaaccggtaaccttaaaaactgcttcgtgacatggagaccaagcattaaaagacaagtctttggagtttttttaaaaaagaaagcaatgtgaaggctgaggcgggtggatcacctgaggtcaggagttcaagatcagcctggccaacatggagaaaccccgtctctactaaaaatacaaaaattagttgggcatggtgacaggcacctgtaatcccagctactcaggaggctgaggcaggagaacttcttgaacccaggaggcagaggttccagtgagctcagatgacgccactgcactccagcctgggcaacagagcaagactccgtctaaaaaaaaaaaaaagaaagaaaaaaaaagaaaacaatgtgaacatgaacagaagcaattttcgaaggccaccacgtcatcaaatgtgtctccactgagagcttcattagtggctaactgcattgctaaagctaagaagccctttactattggtgaagagttgaccctgcctgctctaaggatatttgctgtgaacttttaggagaggctgcagttcaaaaggcggcacatgttcttcttttggctagcaccataactagacgaaatgataaaatagcagacgatattgcgtcacaattttagagaggattaatgagtcactgtggtacacaatccaggttgatgactccagagatattgacaacaggggacaatgccatgtttttcaagaggatgtgcatgaagatatgttgtatgcacttttgttgccaaccaacaccatggctgcagaactattaaagtctttgaatgattacatatcgggaaaactgcattggtcattttgtgccagcatatgtatggatggagtggctgccatgactgaatagctttctgatttcactacttgggtcaaagatgtcactccgaatgtgagtgtgtcacattcagaagacactgtgtcatccatacagaaatgctggctagtcaaaaactgtcacctgaacttaacaacattttgcaggatgttgataaaattatcaaccacattaaaatacatacccttaactcacatccgttcacacagctctgtgaggagatggacacagagcacacaagtcttctcttatacacagaagtgagatggctttctaaaagtagatcactggccagagtttttgagttacaagagccgctgcaggcatttagaaaaaagtcaccactggcagcacattttagtgccacagaatgggtcacaaaacttgattacttttgtgacatattcagcctgcttaatgaactcaatctgtcactccaagacagaacaacaacttcaagttgtaaggtaaagtggctgcattcaaagccaaactagggctgggcacagtggctcacgcctgtaatcccagcactttgggaggctgaggcgggcagatcactagaggtcaggagttcgagaccagcctgagcaacatggcgaaaacccgtctagactaaaaataaaaaattagccgggcgtggtggtatgcacctgtagtcccatctattcgggaggctgaggcaagagaattgctcgaacttgggagggtgagattgcagtgagccgagattatgccactgcactccagcctgggtgacagagtgaaactacgtctggaaaaaaaaaaaaaaaaagccaaactggaattatgtgggcaacagtgaacattgggatttctgacatgtttcagacattagcagaaatttggaaagagactgagccagggccttctttctcccagctggtgcatgatcacctatctcggatttcaaaagactttgagcattacttcccaatcacaaaagacccctgaactgggaaggaaaggatctgccacccatttgtggataagccaggggaatcgactttgtccatgctggaagaggatcagctgctggagatggcaaatgaccgtggccttaaaagtatgtttgatctgacttcaaatctccatacgttctggactaaagtcacggcgaaatatcctgaggttgtcacaaaagcaatgaaaagcctgcttccatttccatcatgccatctttgtgaaatagagttttctgcagtgacagcaaccaaaatgagattacagagtagactggacataaacaacacatttcaggtgtcactctctcctgtcatccctaaatgggaccatctagttgcatgaaaacaagctcagggttcccactggttctacattatggtaagttgtatatttattttattatatattacaatgcaataataatagaaataaactgcacagtaaatgtaatgcacttgaatcatcctgaaactatcccccaccccaccccctgccccatgctatccatggaaaaattgtcttccacaaaaccggtcccctgtgtcaaaaaggttggggactgctgatctatgtgactataataatcaagtgactagtctcagctcatagactgattttgccttcccaagatcaaaccctaagttcagaaaagtgagaaaaatgaaaacttcatgatgtcttttactcttaaatcatctttgcagcttcctagagggccattaggtaaccacaaatacttgggtttttaaactttctttctttctttctttctttttgagatggagtcttactctgttgtccaggctggaatagagtggcatgatctcggctcactgcaacctctgcctcccaggttcaaatgatccttctgcctcagcccccctagtag

SEQ ID NO: 507 - DNA, 2380 bp, Homo sapiens
attgcctataaaataatttcccatgataaatatctatatatcccatatgtaatactactttaaagctaatagtatctacaaacatattgactggttttagactggccagacttactgaggtgcaaagtactcaccttctaactactgttgaaggaaaatctatttggtcaacatcatcaggcaccatatttcagctccgtgcaattttcaaaattgattttattcttcattttataaaaattgcatccagtgcttgctagcctaagggtgcttttacagtgactctatacactagaaaaataaccaatgttttgttctggtaaagttgaataaaaagatgtatcatctaactctacttctgtaaaaccagcagttcatttcttttggatgcaagggatgaggagctttcagaggggaagatgctctgggctcagagccgtgtgacacctcaggatcctgcccagtagggagacagtgcagggaggagtaaagtcctgagtgccagccttggggacccacagggattctgtccccaacctatcccaaagcccaatttcctgtggaataatttccttttcaggataaatatatattatttcaggtttcaggcagatcttggaggaaaggagcaaatcctcactgcctctgttgctgtttttaagctgcagccagaaagctcctattgagcaactcaggttccttccatgtggggacgattggacagtggtggtgttaggtgcgttggaacgtgactacaattggaattgatttcttgacaacacactgcctgtgtcccattcgtgcagatagtcttttagcagtgccggtctgctgtcagcttgtagtacctgaattatttggattttgattattcgggggaagttgttattcccaaactggtttccttcagcatctcccctggagttactgcatctcagaggatgtaaagtcattttcacattagtttgaatatcccctaaatggaactggtgcctgagttgaactcaagatctgtctactttccagctttcctgggaacatagcacaagtgaaatggttggggccaaagttttgctcagattttaggggctcccaagccttgctggggaaatgacccaggaataaaaattgtgggcaccaaaacaggaccctggacccctagttctgtgttccttgggagaacacacccgtgatgtttgtgggtccatttcagagcctctgcagatccctgtattcttgccagcagcagtggaggttctgcattgttctagctttctcctgacactcttgaggggggggtcgtgtttcctgtgccagcctcacaccaccagttaacttctgtttgttttctccactgacgaggcctctctcaatgagtaatttttctgttcacaggagcactcgctgaaagattattgcagcggcttcttgtttctgtgaaaagcagaaggggcaccgattcccgtgaacccacccaagccaccgccccactgaacattccagtccttagccttgccctgacgcctgctttctggctgagagccatcactgtcctgggcctctttgcttcattgccatccccagcactagcatttggtgttattttcagggccatttttttttttacatagctgttgtatttgagttttgtttttctcactttataagaatgaccaaatccacaggaataataaagcagcagtgcctgcgttgatacgcaggtgatgagcctcctccagcgtctgcacaaatgctcagcagctgctcaccccagcacccccgccgcaaaggggacggatgcaattccagtgtgcgcctctgcaaaatgacacactgtgacgtgggagagccttgtccagtggaaacccctgtggttccgtctgcagatgtagagcctttgtatagtcagcagctcccatcacaggcatgacctgctcaattaggtaggacttaccctattagaggaattagaatgcaataataaataaaatacaatatgctcaattggtatgagaaataacaagatttgtcttgttcaggactgtgcagtgtccaggtctgggtgtgctcgcaggaccttttctggggcagcagtagcgtggggaggggatgcagaggcaaggcagggggcaggagaggggcagaggagctctggccgccctccatccccggagcccagtatggcctgtgcagtgggcgtgcagctgtcttccttcctggtctgggaacaggtgtgtgtcatgccacagctgaatgccacgtggcctaggtgtacactggcaaaggcagaaagtaaacctgccattttctccttctgatttcaaagttaatttccttgcaacatttttaatatgttaagaacctttgaacagctggcagc

SEQ ID NO: 508 - DNA, 2246 bp, Homo sapiens
gagccaaagatttggacaaaaatgtgggctcacccagattagcagtgctagacactggcaaattaagtttcaacatttatagttcatcttggcagctactcatgtcctgatgtcatgcagccatgatgtaagcgagaaagagtgatgttttgcaatagacggattttggtaacccttcccatgagtgtaggtagtaggataccaatatttatatcacttcacagaaagcatgttacattttgtaatgcagagacattaaatggcttcctcatggtcctctgcatagatgaattgtcctcatgtttaacatcaaaagcttaaattgctgatgtttgttattttcttatgacttttttctcaattagatataatgaatggaaatcttgacatcaccaaaacgaacatgttaaaattaaaggattagatttgtattgtgccaggaaagactaaaagatgaactatgttataatttcatccttttcaaactttatgaaaacacaactatacaaaaagctaccttggggaaagagaatataatgacaagcatttttaattactttttttgcaaatttactggctccaggatggctgacattatattctgtgccccatcctcattatactctgaaatgctaaataataaagcactcatgaatactgatgacttaaggatgtgttctcaaataattggaggatagacgaagggaagtgacaaaatggggaatgaaagaaattgatgaacctcttggctggtgtaatgtagtcaaagatgccagaaacatgttggcatttgtttcctaaataatccaccctcaattaatgacacaactgattgatagctgaaagtgtagttctgaagcacaaactttactgaaaggctctttttagggtcttcttacatatagaaaaaaatgaaacaatttccaaatatatttatgcattttcctcttaagttctgcttaggtacttaaacattgacagatgtggttctagctccataggaatgtcagagattccttcctacaaaattaatggtaggaactacaaggatcacaagattgttttatatgaaatatcataaacagatggttatcataagccacactctgagtttccatacaatctcacagggtagattttatgttgttaataagtactattctataggtgaacaaagttgaatctcatgagtatttgttttggttaacattttggttttgcaacctgaggattttaattcttttcctgatgttctaattttaattatattgtgtttataatttataagtatttatagacaacaaatatttataatctttaaggttatcacccctccatactccagcattaatttctttttccttttatcaggaggcaattcttaattaattaaaggcaatcctgtattgtttcttcccatactctccccagctcttttacatctttttgaaatactcaggaagagaaacgctttctaggtgtggtctgtcactggagtcactgggaggaaacttcaactctccactccttggtatgatgtaagctttgcatactgtgtgaaaacattcagaaagtgctgactgcaatccgtttgcattaaattccttctgaaggaaaaacaaaacaagttaaataccttctactcaaaggaaagcagaattttaagtttggtttaggaatgaatgaaaagttataatttaatgtaaatgaaaggcttgttgctggactgccattgcaagaatagtcaagtttgatcctcttttcaccactcatgatcaaaattgtcttgcttatctacatcacaaatggaaaaaaaaagagtccattgttttagattgaatcttaaaaaatgatagctattattactctttaatattttatatttccttcaaaaataaattattattttacaaactaaaccctaaaacatacctaagataatatcgagtagtgtgtttcagggttagaggtggggttgaggtccatctcaacatgctgatgttgaggatctcaccggcaatgcagatttggaaaaacatttccttattccactgtcaagttttagagctaagagggccttgtagaagatgaaacaaaagcacaaataaattaagcgacctgcatatgactgtttgaattaagtggcagaaatataactaagaggaaggatactgatttttttttttttttttgagatggagtttcgctcttgtcacccaggttggagtgcagggttgccatctcgg

SEQ ID NO: 509 - DNA, 6019 bp, Homo sapiens
gttattttaatggtgccttttgcatgtaacgtttatctgcaccgacagtagtggcaggttacaaagggaggcttggggaaagtggctgctttgggataattatgaggcaccatagtgcacgcaccgggctgggtgctgtggaactggagacgggactaataaaagctctgtttacccacctcgagtgaggctgtcaactacagggacctcaccgcgtttaggaaaggctcttgcttgtctggatgtcaggggaatacaaatgtttatgacaatgctgagcagttgcaggaagtttagatggcctgagggcagaaaaagcactatatatatatgtagagagagagagagagagagaagaacacattgaattattgcacgtgaaatgaaagaagggaaaaaccttccccttttcctactcatcctgccccacaacacaacagaacaaaatacctagtgcggtgaataagatagttccagtaagaagaaatggaaaatgttggaagctgacagctgggttcagatgtagggacgctttcagattttatcagcttccagcatgtttaaaggaggggacttctgtgaggcagtcaagcgaaaatacaagcctggctagaagggtgtctagtgtgtgttgcttaagggggtccccgtgatgtatcattgccttggggttttttttgtttttctaccttttttttctgtttttaggaaattactgattttctgggggaaagtaatatatgttgatcataaaaaaatataagtaatgtagaaaaacaaagattctcaggttctaccaccttgaaataactacctttaatatcagatgaacatcatgaaggaagaaggaggaggagggaggaaggaaagatagcaataaagactttcaaaaactgaagttatggtgtacttttttttagtttatttcttattattaattatatagtgtcaagcattttatctggatattttatgtatttattgactttgtattatttatttatttttattttatctggacattttatgaaaagtacatctgtgttgcggcacgcatcagtccttcacgcctttttagggctaaatggggctgctcgtctgccaagccccttcaccattgtacggacacattccattttgtctgtccattcatcagttgatggacatttgagttgtttccacattttggctattaggaataatgcagccttaaacattcatgtacaagtttttgcacacaggctggatgtatacctataggaatggaatttctgggtcatatggtaatgctgtgtttcattcatataatgaggaagtgccagactgtattctaaaatggccgcaccatcttacagtctcacctgttagtgtgcaagggttccagttgctccatgtcctcaccagcacttgttattgtccatctttttgattctatagccgtcctagtgggtgtgaagtcgtatcagggaggatttgatttgcatttccataatctgttgagaatatttttgtatcttatttttatagtgtacttttttaaaaaagaaaaatgtgttacagatatttttttccaaatttaatagaagagtccaagcatggcttgggttttagaaagctgtgagccagaacagagactctctgatcctactggttattggtgttgcctctggcagaactggaagaggctccaataagtgattagatagatgaccaggggataaggaagaaaggtgactgagtgactgactcctagggatgacagacacacagaaagaagaatcatgtcctgagagcagaattccgaattccaaagaacctcccactttgtgctctaattggttatgaatctgcctttctctgcctgtctctcacccacttccttgtgcattatcttcattccttctgcctttcactgcaccctcctcccaggtgtcctgccagtgctcccgacatttacaaacctcatcccttcagcaccccagagccaggggagttaagaggttgctgccacaaagcagccttgttcttcagaatcagaaatagaagctgggaaattatatatcatcatgagcagttatctcctgggaactgtagacaaaagcaccccgtgtgcccctcacaagacccaggctgtgtattgaagtggcaggtggcaccccgtctcctcccctcactaaagacagggtcagcttggacacatcagactcccaaactgtcagagttacagctaacctgaaaacagcctcccaggattcccaagcctcttgtgactcgccctggatgtcgtccagacagctggttagtcatggttcaagggaaatcgcatgggttgtgtaggtgtacgaaggagatccttcatgcacgtctggaaacagatgcagatgatccaccatcccctgaggattgtccagttaacgtttctggaattgggtgccgcagagatggaaatcgcgtttaacacacaagtgttccataataaccaatctcttgtctactttgtggtctgctttaaagagaaatcgccaaaaaccttttaatgtacaaaatgttatatatcatgcaccaaagctgtattacaaatgactagatgtctttttctctctttagtgcttcagttatctgcacagtttactgggccccgctttattaggggcttgggttgatgtttgtgcctttctagaaaagtaacctttcacaatacttgcctttgaccaaaaagggggctcccttctctgtaactgtgacagctccctccatgccatgtcccttgaacaggtctttccaccatatcctgaccttggaaacccaggacaggcagggagaggctagagtcttgtgtgctttccttcaggatacttcaaaaatagctttagctagaaacagttgggtggcaactaagagggtgtgtaaattcagtcctcagggaaccaaaggccgagtctctgccccatgtgtcagagccggctccagtgtctgtgtgtgatggggagttcccagcttgcattacccagtactcctggtcggccatttattaacacagaggaccagcactgtgctagaaattccttgttacatctgtttgtcttgggtaggcagcagcagggcctgggagctgcgctcctggctggaaacagttgcacttggatatcacttctcagggtgggattaaacacagacaaaagctgaggatttatgctgcagcacagggctcggcagccacagaggccactctgtgagcgtcaagagggccaggagcaggagagtctggcctggagacagggccgctccactaccacccagtggctcccaccctcctggactccagccaggagtgcacaatcctcgtcttaaataggattgagcaaaggatgggacaaccggcgtctgttgtataagcctaggggactggggactgggggcctcgactgtcatggccactgcactaatttgtggagttaactaacattatgtattctaactctgggaggaaaggacatttcagccaccgggctcccatgtgttccaggaggctgctgaatgatgtttctctagcggcactgcttggtaccaccccgcctggccctccttctcggggagcagccagcctcttcgtttgaaggcatctgtcctagaggtgcactgcttctccttctgaatggtgtgattggaagtgatccccaagcactctgccactcttccgcttattttggcccaggcaaatccagccaacattcgagctgtgggtcccgtcagaaagaggctggctcactggccagcctgctcagggtctgccgtgtgcttcccaccgcagcagctaccacaggcgctgagaaatcgctccctggtctgtgtctgcagacgcagacccaggaggggccccgcctacttccaggcacaggctgctcgtccgcctggttttcctggagggaactgctgcgtagatttttcacgagcaagtccttacaggtggtttctgttttgagccaggttttcagctaggagcttttttgggagtctgtgcagatgaacaaaatcaacactggtcaaagtctagatatctacgaggaggggataaattatgataaatacatctgatggatactagctagatctttttattaagaaagtacttctgtgctaaatgaaagaaagcaggacacaaactgaatatacgttatgatcccaagtatgttacaaaacagaaagaaaaagatgggaagaaaaaacaccaaaatattaacattggttttcttgagaaaatgggaattccggtgatctcttttgatctctcctgtatttccttatattttctgcagtgaatgtgtattaacttttattattagaaaatgatttttaaaatttaagtcctagttcaaaaaataaacgtgtcagagaaagggggcagatggactcctccgacttacagggcagctccatggaacgccatccaggtccccagtgcttctgctggcagcactccactgataagcatgttgagagtgaggaagtttcttcccgcttctgtgccccctttctcccaatggtttcctcattgtcaggccacgtacatatctgctgaattgagttggaggcacgtgcattctgtatttttctaagagtagggccaggcttttcctgagcagtcgggcagcggcagaggggtgccctgtagggagcttacccaggacctgccaagcacacctccttggccacagtcacagcgcacgttctgaggcaccaggctgaaggcgcagtgcctgtcccagcagtgataagtatttgtggtttgtttttgaatcagactggggaagactttgagccctgctgagactcagagcatctcccttttatttgctttgctgttcgtgctaattatggaagagctctgtttttccaggaggaatggctcctggttggcccgttctcggccaccaaggtaacagggaaagttgggtgttcagtcatgactgtggactggacggaggtggcaccggtgggagaccaacagaggaagccctcctcccggctcccaattctggctttcgctagaagacaagagaaatgaggaaaacagctaccctaggaaatagccttccttgaaaatggtttcctttttctcaggtttgatgaatttggggatttgttgttgtcattttttaagtaaaaaaaaaatgccccaaacattagcgttcattatcctagtctgatttgggtccggctctacctgtaggagatgaatgtggtaggccagggggcccctgtggattctaatttatgttttcagttgtttgccattttgtatcttcattacggggctactttcctgcctccctaaagtcatctttcccagcatgctgtttctggactttatttagtaccgtggttacctcctgcaggctgtgtggccccatccttcaccaaaatgtcacctcaattaattcggcggccatgagacagatccatcagtggcccgccgactcccgtcagcaggcgcccatgagtgatgggcacctccacgcctcccgcggcccccccccgccatgtggagtcagccgggcaggactcaccatccctctgggcacgagggcatctggctggcccgagtcctctcacaccttatgctgagggagacttcagcctcaggaggagaccccaggtgcattcactccacctagctggccttgttccccagccctgcactcagggatgcctcaggagagccaacgctctggcagggcagccaggtgccctttccctttgggccaggcccaggcagtggggacttaattgaatctgctcattcccaccccagctccacacagcacagcactgcaaatggagctggcagaagagctgacttctcatttctctttcctctcccttctctggtccataggtgtttgaggaactgtggaagagggaaggcaagactccagggcagattgtttcagaaaagcagcttgaactgatgcaggaccagggggcactggagcagctctgccactctgtgatggaggcc

SEQ ID NO: 510 - DNA, 111089 bp, Homo sapiens
catcccatcgacctggtcccccagtccagtttggcactagtgacaaggtctgtgtgggctggatctgggtatcctgagttgggtggagagaagggaaggactaaaggtgggacatagaggacacatgtctgtcacgggacaatgtctcctgccttcttgtgatcacaggactcagacttacgcctagtggtaggagacagcttgaaagcagagaaggagctaacagcatcagtcactgaggtaagtgggagtaagagtttggtggaaaggcccaagatttctggggaagattgctgggagtgaccagggcgtccaggatgccagacatccctctccacgaggcctctccttcccaggccattcctgtatcacgagactgggagctgcttcccagtgctgctgcctctgctgagccacaatccaagaacctggattctgggcactgtgtcccggagcccagctcctcaggccagcgcctgtatcctgaggttttctatggcagtgctgggccttccagttctcaggtaggccccgcttcccattgcatgaccccttcagtgaataataatttttttctgcctggtatgtatttataatcaagcctttctacgttgcagagttgtgagataccactttgtcacatcatttttctccctactttttgcttctatgggtgggatggtgatcttttttcttgaccacagatactaaagctgtttcaaccgtgctcctctcctgcagatctctgggggagccatggactctcaattacatccaaacagtggaggcttccgccctgggacaccctcactgcacccttacaggtaagactcgatgcctgtggatcacagaagtacttggagatgtgtttcggggagagggaaggggaagacacagttctagggtactagaagctagtggacttaaggcattgctaggactctggcttcctaacagcttttctccccacaatttattttcagatcacagcccctatacctaccccccggcccagcccctccctcagcactgctctctgggttagctctcaagggccagtttctggatttctccacaatgcaagctacagagctggggaagttgccggctggaggagttctctaccctccaccttccttcctctactctccggctttctgccccagtcctttgcctgacacatcgttgcttcaggtaagaggggggcaggtattagatattgggggatagggtagggagaatgattttgtgggggttgatatatttctccctgtttcccgacaggtacgccaggatctgccatccccttcggatttttattctactcctctgcagcctggtggccaaagtggctttctcccttcaggggctcctgcccagcaggtatattgtatcttcacacttccccttcatttgatttctctgtccagttgctggctttgattttccctggttttctgacattcctccctgcccccaacatgcacacccaaatttcttgttacagatgcttctacccatggtagactcacagctgcctgtggtgaactttggctccctgccgccagcaccacctcctgccccacctcccctttctctgttacctgtgggccctgctctgcagccccccagcctggctgtgcggcccccacctgctcctgctactcgggtgctgccttcacctgccaggcccttccccgctagcttggggcgagcagaggtaaggtacaggaactgaggggctagggagcgccaagacttgggagtagggattctgtatttcaaggtaggcagctcatgatttttttcccctcagctgcatccagtggaactaaagccgttccaggattatcaaaaactgagcagcaaccttgggggacctggatcatcacggactcccccaactggaaggtgaaacggaatagggatgtggactttccaagtgcttccttactttggaaccagggtctggatcctaggcttgccttagacgcccttcttcccttaggtccttctctggcctcaattcccgtctcaaggccacgccttccacctacagtggagtcttccgcacccagcgcgtcgacctttaccagcaggtgaaggagaaacccttgtggccccaactctaaattcgagttgccacctgatttcctgtccttccgtctcatcgctgacctctcactgtgactcactgtttaacacatgcctgtcccctaggcctccccaccagatgccctgcgctggatacctaagccttgggagcggacagggccgccacctcgagaagggccctcccgacgggcagaggagcctgggtcccgaggggacaaggagcctgggttgcccccaccccgctgagggagttcctcttgccccctacccccggggcttgtatatagattataaatatataagggggaaaggggtgggcggggaggggttctggggctggggcctcacttcccctcctcccccttcccctggtcccctgtccctggggctgtttgttaaaaaagagtaataaaaggatttaaaaaaaaaaacttctacaatgatttgggggatgagttgtttgcattgtcttaaagcatggtgctgagtgatctgtagtttcagtcagggaaatattcattacttattccagtgagctgttgaaactaaaaacatgaccatcgtattggatctttaaatttttgtgagtctggaatttgggctgagctcagctggataaatctgcttttttgtgccagtgagcgaggtcaactggttatcagtctgcagctgacacctgggctggtcccaatatggcttcctttgcatatctagggccttggtgggacatctgtaacattactgggttatcaaccagtgtcttcacatggactctccagcaggcctgttaaatgtccgtgagctcatgttccaagaggtctagctggaattttctaagcttatgccatgcttagttgataagagcactaaactagccaaggtaggggatgggggggtttagaagggacttcaactgcatctcaaagggactagcaaagaatttgcagccatgggacttcagttctttatgatgaactaaggggaaatctctgttaaggcctcaatgttggagcacacttaaggggctctttgaattggatagaccaattccagcattgtcaaactaagtgggatttcacatggtaacgctgcatgctagttatgctaaagactatacttaggtctgcagctgctcagaaactttttttgatgggtaatttgagagctctatgctagtgtgcacctggaatatgctcccaactcaaaatacaggttttttatttatatataaagtgctttcgcacaaaaaatacaaacatcaggctgggcgcggtggcccacgcctgtaattccagcactttgggaggccaaggcgggtggatcacaaggtcaggagttcgagaccagcctggccaatatggtgaaaccctgtctctactaaaaatacaaaaattagccgggcgtcgtggcggacgcctgtagtcccagctactcaggaggctgaggcatgagtgagaatcacttgaacccgggaggtggaggttgtagtgagccgagctcgagatcgggccactgcactccagcctgggagacagcaatactctgtctcaaaaaaaaaaaaaaacaaacatcaaaactggcttgtacaatttagcgtgctgagtagaacacaacagtgttccaaggaagtattaatttaaaaaagttcacacaagattaagggacacactacctaatggagacaatgtagagagaaagcagccagaaaaatccgacttttatttcttaaatactgtgaaggaagaggggggaaacggtcccctgatgaggaagggccatagagcaaagagctaaggatcatcagcaaaggcccgctgggcattggggaagcgctggggactgtagttggggtcttcctgcagtcgtttttgtatatcagaccggagctaaagagaaaaagtaagcaggttggagaaacgctggccaagtccccatgatcccagcaagcacacaaggccatccctcagaagctaacatttccccccccaagcacactgtcaaatagcccggggtggcactgtcaagccttcccagatgccaaaggggaaaacaaatggtagcaccaggctgaccagttcatcgctgaagggatccagggaagagggaccctagcccaacccctcccactagaccatccctattctgcttcaaggtggcacctgctgcctgtagctctcctgaacctctggtgcctccaggtcccggctcaggctctcggggctcgtcaggggccgagctccggctgccttagctgcccggctcacagcctctgagagaagcagctgggggccctcaccctgcatcgtctgggggacagggggttgggagggaaaagaggatcaacgtcagatccagtgccaccatccggctcaccctttccatgagtcaaccactccactgagtctccatgctagtggagagaggggaaattaagagtccaggatgtggtttttacagcagaaatgccttcctaattctctttggcactagccaaaactaaagtgaatgtgcttgaacgtgctcttcaaaacgaaaggcagaaggggtcaagccatccgggattcagagctaggtaatccacaagaggaaacccaccttaaaggaaaatgggatctaagcacatggggattaggcagctgagcaactaatacaggactgctagcaaacagactaaggtcaagtcctgtatggttatgcaacaaccaagagcaagtctgaatcccagaaaaagtttcctcattaaacgaggggaggggagactgaataacaagagctcccaccatctctacatagtttgattccaggcatgacggggaaacctggatagagagagaggcttagggaagaggaaaaccaaccttgcgtctcttggcaggcataccactgaggtaggcatcactcagagggggctgcggtttcaccttccgctggctctgaatgtcctgctggataatagggacccattcctggggaggaaaagagaaaatagtaatgtccttgactttcagctgccatgacccactggattacttcctgacacttactggggggactgcagctgcccaaggttctgtctcagctgaagctccatcctgttcatcccgggagcccccctcaggagcaggaggtggacctcgggacatggcctcttctgctgttgttccaggggctggggaagcattctcccgctgggtgtcagatggcgggaagagccaggcttcagaatttttagcctccaaacctttctcccccagccctccactccacattatctggcccctcaacctccccctctctagagtacctgaggctcaggggaagctctttctgctccctgaacttccattggctcctcaggaagtggctgtgaaattaaagaacaccatacttcctctcagatctctccagttctctcaagtaccctgaccccatcgcccaacaggtcccttacctgggggggatcaccaaccctgcgaacgtatctgagaatggcatcagggcctacaggcatgtgctccagtaccacctgaagcctcagtcccatcatagtggtcagccagctcaccaaggagggattcaccccacgagacatacgacgctgagggacagaaagcagatttagaacacaaaaccctcaaccacctttagaaatagattagatccaggttacagaatgtcagtttagaaaagaaaaatgaaaactgcagagaatggaaacctcaggaaacaaaaggctaaggatctggggctaggtggtgcttacaattcggccattgataacagcagcaagctccatctgctgtccccccaagcagtgcaggtttagggccaggcattcaaacaggccttggttacacaactccagcaaccgggccccaaatccactatctgtgggcaaaatacaaggagggaatgctggcacgtggcagccctgcacatgcaacaggccccacttgcccccgcctggccagcccctgacctgtgcaatgcagcacatgcgcagcaatgctattaaactgctcttggagaaattccaggtttgtccggatgatgtccacacctggctgaacctgcaccaaggactgagagacaagataacacaaagatcccaaaatcaagaatcataagactgggagtggaggaggcagctgccttgaccagacccaggagaggaaaggaatagagaagggttactcacaaaactctcccgcacatactcttctagccccgtgatcaatgtgtgggttgccatctgtggaggaaacagaacaggtttagttcaaagcctcagtcctcccaagacttccacctcgaccccaacaagtccagggcttgtgtgggggcaattggagctttacctggcagagaagcagtcagaaataaggaataaaatgtgcaaaagaggagagttctggggcccctggccttcatttacccggatgttactgggtgtgggctcctgaccacccaggtagtgctggtggaagaaggatcgcagctggggctggagccgttgtagtggctggaaatgcccatggagaagcatcactacgtccaccatagagaagttctggcacagaagagaaagcaaggccccaaagaatcctgggggacaagggcagatgttagcaatggcctttaccacctggcctgcccacccacaaccagatcatcaacctcatcccaccttggcaacacccctaaaccaaggccatctacattcctctggctgccccttcctggagcaagccaaagcatcctttttgctcaccaagggccccatcagctccaggctcaaagatgttgctggatccactgaggcgttgtatgaaggcagcaatactttcactgctgccagcccgagcccccagggagcccagcagggagctgagcacaccctgcaccactgaggtaaaaaactccggtgacaggctctcaagacccaggcctccaggactccctgcgccaccagaaggggagcctggtgggggcatggtctgctgctctggggcaggtggtgggggtggaggaggtgggggtggtggaggggctgtctgtgttgcctggcaaataaagaaagaacaaagaacagaaagtgaggtgagaatgaagacacacggaaataatacggcatcaagagggcacaaaccaacgggtctgggaagatggggagttacattctgatcttcactgcttaaagcagaagtatggtaggtatttaacagagtcaggcagcacaacttacctacctcttcctctgaacaggctgtcagaaagcagtgacactaattactatactttctttttctaaacctcattttcttcatctttaaaatgaaaggttcagagtcaatgaattcccagggccccttcccctaacatgtcactaggggctcttacccagtggttatataatggcaagaaggtaccactgcctggctgggccgggggacaggaagatgaggtgaatggcaagccagccactcacctgcaagaagtcagtcatgccttggagaaaggcagggacaccaggcatcgccacagtgatggtgggagaagccacaccagaccctccagcccctggccctgcaggccctagcaggttccccagaagctgagagaactgaagatcagccatggagggttgaggggtgggtggaggctgggcaggccccccaggagcggggccagctgtggtagctgtgttggtggtgccagcactggcagaagcagtggcaggggctggcggtggagccatacctggggtcccctgagctgtaagaaaccaaaaaaagaaagctgggctgagcatggtggctcttggctgtaatcctagcaactttgggaggccaaggcatgagaactgcttgagcccaggagtctaggccacatagcaagaccccatctctaccagaaaaaaaaaaagacaattactagccaggagctagtactgctagctactcaggaggctgaggtgggagaactgtttgagcccaggagttcaaggttacagtgagctttaactcactggattgcaccattgcactccagtctgggtgacagagcaagactctgtaacttaaaaaaaaaagaaaaaagctggccgggcacgatggctcaagcctgtaatcccagcactttgggaggccaaggtgggtggatcacaaggtcaagagttcgagaccatcctggccaacatggtgaaacccccttctctactaaaaacataaaaaattagctgggcgtggtggcgtgcacctgtagtcccagctactcaggaggctgaggcaggagaatcacttgaacccgggaggcagaggttgcagtgagccaagattgtacactgcactccagcctagcaacagagtgagactccatctcaaaaaaaaaaaaaaaaaaaaaaaaagctgaaacctgaagacacaagacactacagcagccccattccaggaaagcaggaaccaagaaaatatggaaagaactggaaagtgccagtgagcagactaggaaaggagtttaaactctgagtggggaagaatgaaaactcacccacaaggactggctgcataagaagctgccccacaaggccgctcaccatctgggccaacgaggcattggtacccagaccggcgccctgctggatagagagcaagggagaatttcagacctgcccttccatgcaccaccacaggagtctctccctagactgttacgcactagaactccccgacccttgctcaccagtgtcccagagactgggggccctccaggatgggaaggccgagcctgtggaggagtgggccgggcaatcaccacccgggttggagctgttgggaagcctggcacctgctgtcctgtgggtggcagaagagacagaccgaagagggctgagggccaggcccttgccagccagctgccaccatggactgtgccctacctcccaagcctccccttccaggtcattacctgcggccgcggaggcaacagctgccaccatggcctgatgagtgatctggtgggcgacggcgtgcatgaactcagggggcagggagggcagctggatgagggtggagcctggggggcgggtctgatgtaaccttgaacctggaccccttcaacccacccactcagcccttccctttctctacccagagctcagcctgccctgatgccctcactcttacccagggtttggccatgaccagggggtcccagggggccagtgggagcactcggaacaccaccaggctgtgtgccagaatctgggcagggagacagagacagtggccctgaggtaggtagggccaaggcctaactatatccttctgagatcaggcatacttcaggcccataatcccccaatcagaaagcctgcctttccctccatctaaacagggagaggtactcccttcaccacacaaacacacctccaaagacaaaccaacccccacaccccccacatctgtctacttaagcttctgctctggtccccaggctaccaccaccagcatgtgcctctcccttccccaccctgttccctcacacctcagcatgaacctccctcatcatgctgatcctgctcttctcgccagcaactattctcaccttgaatgttcatgtgcatcatgaccacgggttccacactctggtgggaaatccggatgaccctcgggtggctggtggctggcgggggagctggacctggcgggggagccccctcagctgaggactcgacattggtagaagacggagccacggatgaggcctgcccaggaccagggggaggtgcctctgcattgggagttggggggggccgagtcccatttcctgtcatggtcacagtggttcccacattgatctgaaaaagacagatggacaggcagatgtgagaaaaatacaagagcctaaccaagaaaacctcatgataaacctctaaagtatctccagccttcatcaccatgtttccagtctcctcctttcctaacctccttcaggcccagtagctaccctgggtcactctatcaacacccctcactctccctcaggccagactccccctaacccacctgtatgggaatggctgcctgctggagcaccatgggggtggtgtagtgagacataggccggaccacatgcaggtgtcgtgggggcgtgcaggccagattgcagcgcaggtcagacagtgcaacaaaggtgttgcccagcagtcgcaggctctcccctaccaagttgatcaaccgctgatcctcctcccggccctcgtgctgcgcacaaccagccaaacacaaaaaggcagaaaatatcaagctggagtccatctcactaataaaagcaataatgcctactgagaataccatgtcctccaaaactttcagttatatccttggaagtttacatgtagaccaaatctttgcaaataaattatatcttattcacataaggaacatcctattaaaacactactatgaatcagtaagtcatcatatactgatctcctgtactttacattttctaaattcattcaggggcacaaggggtacgatacgaggacagtgcttacagcaaagattatcaccttctctgtaagggaggacaaaatcacttacaggtttagagagaaattgttttgttgcaatgtgtgtttttttgttttgttttgttttttgagacagtctcgctctgtcacccaggctagagtgcagtagtgcaatctcggctcactgcaaccccctcctcccgagttctagcgattctcctgcctcagcctcctgagtagctgggattacaggtgtgcaccactacatccagctaatgtttatattttcagtagagatggggttgcaccatgttggccaggctggtctcaaactcccaatctcagatgatccgcccaccttggcctcccaaagtgctgggattacaggcgtgagccactgcacctggccctgttgcaatgtttttccagggagggaaagagttatctgcatttcagcctgttctgttttgggagtactggggctgaggagaaagggcagggccatcaaagggctcacattgttattgtagtccgtggtggcagcagcacccagaacctcgtagtagcgctgcaagaagggctggaggcgactctccagccgctgtagctcctggagcacctcgacatactccgcaggggaaggatggctgtggacaaacccaaggggcaatgagccaaagccttcctcagattcccaccctcacagtcaacagggaccacatgtgccctctttctccctggtctcccagagccctggcccaatccttctctggaccagcagagcttctattctcttcaacctccgcctcccaggttcaaacgattctcctgcctctgcctcccaagtagctgggattaagttgcctgccaccacacccggctaatttttgtttttttttttttttttttttttttgagacagagtctcgctctatcacccaggctggagtgcagtggtgcgacctcagctcactgcaagctccgtctcctgggttcacaccattctcctgactcagcctcccgagtagctgggactacaggtgcccgccaccatgcccagctaattttttgtatttttagtagagacggggtttcatcatgttagccaggatagtctcgatctcttgacctcatgatccacccgcctcggcctcccaaagtgctgggattacaggcgtgagccactgtgcccggcctgtattttttagtagagacagggtttcaccatgttggccaggctggtctcgaactcctgacctcaggtgatctgcccgcctctgcctcccaaagtgctgagattacaggcatgagccactgcacccagccaaagcttctattctttactcccacccatgagaggatagggagaagaaaatgaactgctcccaccctccccaccacaatcctgcacctacaatggtgaaagactaattctaagaaagagagcaggccttcgtgaactcagaggagaattccgatcaggctcaggagataccatttggatttccttgccgtagggagagcagcagttcttctcagctgcctgtcctagcgtcatttacctataccgagagagcccctcctcgcccctcaatgctaacccttcaactaagacctccaagtaatcctttccctcccttgccatggttcatttccttctccccatacttcacttaggattccccacccactaaagattccctccatctctcacttgggtgcatttgtttccggggcaggtgttgggcccgctggggctgggccaggagtgagctccgggttctgggctggggcacgctcctccacttcttctgcctccatgggctcccggggaggtgcttcactttcaactggttctgatgtttgagagctcaaggctactggctccggggtcacagccggtggctgcgggggcggctgactgtgctgcggttggggccctcctcgacactgaaggtaggggagagtcaggataccaaaggcagggtaagactgctgcagaggattactctacaggagactgaacagagaaagtatcctaactagactccctgaaggcatggctctgcaattttatctccgactcgctagcaactagcataagactgacacaaattagatgcataataagcatctgtaatttttttttttttttttgagacagagtctcgctctgttgcccaggctggagtgcagtggcatgatctcagctcactgtaacctccgcctcccaggttcaagaaattctcttgcctcagccttctaagtagccaggcctacaggcgcgtgccaccacacccaactaatttttgtacttgtagtagagacagggtttcaccatgttggccaggctggattggaactcctgaccacacgttatccccctgccatggcgacccaaagtgctgggattacaggcaggagccaccacacccggccacagcatctgtaatatttgtaaataaatttctaacaaagagtagagattgtggtttcctttcctccacaagttggtttcccagcctccacaagttaagagagtagaatcctttaattgaaaagagatgccatgagactaagtctgaaacaaactccccagataccaggcaccaagaggattggcagaaatgagagagcctcacaaagatactttttctgcccaaaagaatgaatactgcagagaagactagattatgaaggccaaaccctgtggatgtggccagtgaagccctaactcccaggctgagagaaaagggagagggagggtggagagagaccctagccagccttgcccacttacctccatccgggatagtaaggtctgtatatccctgatcatgtgctgagccatcaccagccgtacccggggctcactctacaatgagagaaggtttatcagggtaggttacagatgaagccatgagttctaccacctactaaatcaggtcccagccatctctcagccaggtccaccccacctcccagcctccttctcccagatccccttccctgaccctcggaggcccctcaatacctgaatcggggcctgttccatgttgatgtgaacatccacagcagagccgtcactctggggaaagggtaagggaagttgttctgggagaagccaacactaaggcctccacacctccaattcattccctggagccctacctccttttctccttaaagactgagaccaatagcacaccacagggccccctgaacccaatctaaagatggaagcatctatcttattaattccctggtgctaccacaaccaaagctacccacaaaagccctcccctgtggaacataagcttacaggaagattgaaggttccaaccatgacatagctgttggcattccggtcatgaacagaggccccaggcccccgagtaccagggggggatcccccaccatgagtggctgaggcagaccccgtcccagaagatgccccagaagggaggtgagtctgaggaggagcccgttccaccaggtggataacctttcccccaacatctgcagaaaaatagacacacaccaaaacatagtatgaacaggtaaacccatggcctcagttcatccctccagacagtagccccaacctctgaactgcctccccagcccccttactgtattcctgaagcttcttatcatcttgcagaactcgtccctggtaaatgagccgttgtttttcagatgggatgctgacagaggcagcaatgtgctccttaaactcttttacattcatctgaaaagaagaggcatgcacaggaatggaaagaatggaggaaagaggaagaacaaagacagacaaccgagttgtggaggtgaggggtaaaaaccaccacagaatcactacccgtttgtcttgaccgtgagatcattactgtgcaaacccttaaactaaagtaacagctgtcaaaatacagacaataaatttggcttggcgcggtggctcacacctgtaatcccagcactttgggaggccaaggcaggcagatcacattaggtcaggagttcgagaccagcctggccaacatggtaaaaccccttttttaccaaaaatacaaaaaaataagccaggcatggtggtcgcctgtaatcccagctactagggaggctgaagcaagagaatcacttgaattcgggaggcggaggttgcagtgagccgagatcgcatcactacactctagcctgggtgacagagagggactccatctcaaaaaattaaataaataaacttaatgaagctcaggttatagatccaggaaaaataacacggatgaaaaacaaaaaaaaaacacatggacattatattatctgtctggcatccaagggagtatgtgtctagagacatcagtgacccctttccaaacacaagatgataccagtttatttaccagactctcctgtgatttccaagattaaaaaatggcaaagaagatggggtctggtatcaggttaatgaagaaagactaagaagataagaaagcaaaaaaggtcccagcacagtggctcacacctgtaatcccagcactttgggaggccgaggcaggtggatcacctgaggtcaggagttcaagaccagcctggccaacacggtaaaaccctgtctctactaaaaatacaaaaattagccgggcgtggtagtaggcgtcgtctgtaatcccagatactcaggaggctgaggcaggaaaattgcttgaacccaggaggcagaggttgcagtgagctgagattgcgccccagccctccatcctgggcaacaagagcaaaactccatctcaaaaaaaaaaaaaaaagcaaaaagagaaatatttttcctaactacaaactgactcttgggaagtaccagagtatttatatacatctaatcacaagtctatatatggctttcttatatccaggtaatatcacattttagaaaaccatggaccaccccacatgcaatttgtctccaagtattacaggagtaaagacacagatagctatgtccaaggctttaagctcaagagactcaagctatgccataaaaattagtaatttcactcaacagtctatcaaggacctatctccattatgggttctgatttctaccctttaagaacacagcatagacctgaccaatgtctatcagtaagacacacttgcttagggttcctgtgctgtttcccttcccaaaggccagagccatgcctgtccctttgggttggggtccacccatgatgatgacacacagattcttccttcctctgtatttccctctgcattaagttctatccatgtggaggacagaacaaaatcagcctcactcacaaaacatcagaaaacgttctactggaatacgaacaaagggatcaataaaaataaaatctgaggccaggtgcggtggctcatgcctgtaataccagcactttgggaggccgaggagggcacatcacctgaggtaaggagttcgagaccagcctgaccaacatggtgaaaccccgtctctactaaaaatacaaaaatcagctgggtatagtggcacacgcctataatcccagctactcaggaggctgagataggaaaatcgcttgaacccaagaggtggaagtttcagtgagtcgagatcgcgccactgcactccagcctggaagacagggcgtgactccatctcaaaaaaaagaaaaaaaaagaaaatctggtgaccagaaaatcaagctcatctctcaggctaaggggcctaaacgaggaaaagctaaaggtgtcttccagaactagtgaggtgtctcacctgggcccccacaataaaggtacgagtttgagagtccaaggtcttcaccaacacctccaagctgtcaggctcctccacagcggtactggtactatcattaggctccatggccgacaggtctctaaagaagaacgaaggaaggaaggcccgctgttgcccagaccagagtgtacccgaaagactccctagcattaatccctgccccaatacctaaaaagtttctcctgcacacacacacattcacacctgtccccatcccccttctgattccggggcacagggagagaaacacaaagggcaggagatcgacggcttagggagctggaggacgagaggtgggaggggctccacgacgccaatcacaataagcagggagccagtcagattaggaaggaagcacgagaccagagactagtgtcatcaccggtcacggcaggacaagcgccccagaggtcggaaaatcctgggacaacgcgaaagcggtggtcgccccacactctgcggagaaagtggtttcgcgcacgcgcgccacgcccatcgaaccctcctaactcactatagacccgaaacggcactcacggggcgacagacctgctagctgactgcccgcgtctactgccttcccacggtgttccagcagaacggcacaactaacccacagccaaacacacacacacacacacacacacacacacacacacacacccaccaccccgcggctccgcccccgacttccccacggaccgtcacttccggtctcccccaaacctgccaccgacggccacttccgtttccccgatagtatttggggatctcgaagcgatacttccggctccccccaggtccccaagctttacttttgtggggcacgacgagaaagtccgcagccccaaacagtgagtttctgagggcgagtcgggccggggccggcctaggtgggagggagccgagcaccccgaggagccgccaccgctgtcgcccgggggaccgtactacgcctgcgtgcgtcgcactacggatgcgtggacacttaagcatcgccccaccccctcccccctctggcggcgttcacgtctgtgcgcgcgcttgagcgctagaagattgaggtggctaccgtaaatgcctgaaaaacagtcaccagctgggactctaccactgcctcgagaggggctatggacggtcgtatggaccttggactttggagatgggggattatgccacattcatctatgtttaaatcttggcaggctgataatttcaggcggcactgtcctagccagctaaaactcttctccaccctattgccctcgctgcgccctttcttctgtgcctccggaagttactctttcagtaggcgtttgggggcggcactggtcaattttgttctcggttgcttggttgggctagatttcggttctgccgggtgggcgttttaagggctgtgggcgtcacattcgtcggtgtgtggccaaggggacatgacacgttttaggaaaagtaaacgtgctactaagttgcacgacttgtcaagaaaagaggcgcttccgagtttgagaattgggagcaaatggagtccgagtggacagaaagacaagaccctgaccgtggggaatttaaaggccggccagcgtgcttccgaaggccgggggtggaggcattaccgcctctccgtgccctcttctcttaacctgccctgggccaagggcctcggccccgcgaaactgcgagtcctccagaaagacacatcgctgttggggtgtccaacctttctgggattcgtagtttatacccaggtcctggttatattttagttaagagttctaataagcagctgtttaatgagcacttgtgccagcccatatactacgggttttgtgtattattttaaaaagccttttaacgagcttttaacattttttaagtgagtacacttagacgaacataagtgtcagaattgacaaatccaggcctacaggactccagatcgagcacttgtactttactgccccaataaaaagctgttaacattttagcttatttttttgagagagggtctcgctttgtcgcccaggctggagtgcagtggcgcaatcacaactcactgtagcctctgcctcccgagcccaaccgatcttcccacctcagcctccctagtagggaccacagatgcacaccaccacacctggctaattttatttttatagagatggggtcttgctatgttgcccagcctggtcttgcagacttggcctcccaaagtgctgggattataggtgtgagctactgtgcctaaccacattttagctttttattacaaaaattttcggccgggcgcagtgactcacacttgggaggatgaggcgggtggatcacgaggtcaggagttcaagaccagcctggccaaaatggtgaaaccccatctctactaaaaatacaaaaattagcctggcgtggtggcgggcgcctgtaatcccagctacttgggaggctgaggcagagaattgctttgaacccgggaggtggagattgcagtgagccaagatcgcgccactgcactccagcttgggcaacagaacgagactcccatctcaaaaaaaaaaaaaaaaaaattcaaacattacaccaaaatagaacagtattaataaactctaatatactggtcacccaaattttgtttgttttttaactaaatcgcaagcctcagccctcggcaaattttttgtggcagtccatgggatataaatttatcaagctaggtgtggtggctcatgcctgtaatcccaacactttaggaggctaaggtgggccgactgcttgagctcaggagtttaataccagcctggggcaacatggtgaaactccgtgtctacaaaaaattagctaggcgtgatggcgtgcacctatacctcctactcgggaatcatctgagccggggaagtcaaagtcatgcctgggcgacagagtgagaccctgtcttaaaaataaataagtaaataaataatctatcgaggaagatccatctctcacagcattaactgctccagtcacttggtgctatccaaggacaacctatttggcaattcttactgcctattatttgagaacttattacccaccagaaactaagtgctttgcaaacattactattaattatagcaaatatatactttggacttaccatgtgcaagtctttgctaagggctttatgtgcattatttcatttaatcctataagattgatgatttgccaattttacagatgaaaaaacagacatagcagttaggggttggtggtgttttgtttgtttggagacagagtctctgtcgcccaagctggagtgcagtggcacaatcagggctcattgcagcctcgacatcccaggctcaagcaatcctccctcctcagcctccctagtagctgggactacaggcgtgtgccaccacatcggctaatttttgtattttttgtagagacagagttttgccatgtagcccaggctggttttgaactcctgggctcaagccatccgcccaccttggcctctcaaagtgctgagattacaggcatgagctacctgccctgcctgtagttagggtttggacacattctgcctgacaccaacatctatcctctctaacagccagattacatagcctctttgtagtaataaatgttgagtgaatgtgtcagtgaacactgccagggtatacatatttttctaattgtaaactaaagagagcaatccaccgtgccccagcacctgcatcatacctgttctaaagcatttaccaagttgtattgcaatggtttgtctacacagctagttttccctctaacgacttcttcaagatcaggggctatgtcttattcgtttttttatgtccccggggattagctagttcttgggaaacaactgggacttgggattcaaaacagtttgctaagtgaatgaatgagaggcccagtcaagctacttcccttcagtgctgcacagtgcaacaaataaccagctcagatacaggttcaaagaccacaggcttctccctggacagctcagctctcctcataactcctgagaaaccctggacatgccagggtgtactatggagtggttgcatccggaagagggggaggaagtcccaaacactaagtaatccaggtttgggttggaaaacaaggttgaagttactcattagcaggtgaaagggtcaagggtcgaacgcaagggagctgaaagcagagtggactgagcagccagtaggggagagagcagttaaggcacacagagcaccagctccctcctgcctgaagatgttccaccaaatttgggcagctctgctctacttctatggtattatccttaactccatctaccagtgccctgagcacagtcaactgacaactctgggcgtggatgggaaggaggtatggactgagattgggggaagcctatggtggaggctctgagggacttgggtggatggcctaggatgactggagaccatcttgggaaaggaagagaggaagggggtgtgagtgttgtgataatgaaagcaagaagaaaaatatcagtactgtggccatcaatgcagaggcatggcagaattggggggtggggtggttacccaggttgactggggaggggcaaagaggaaaagtcatttaatgactctttgtcatggatccaatccccagttggaaagaggaaggcagccaacacctctacccctaaatcttgctgttttgactgatgaagaggttgaacccatcctgtgctggaacccaccctcttttgctcccttcattgtctctccagttcccagaggtccacttgggccagtggtactttatcgcaggggcagctcccaccaaggaggagttggcaacttttgaccctgtggacaacattgtcttcaatatggctgctggctctgccccgatgcagctccaccttcgtgctaccatccgcatgtgagtggtaaggaggcagaagcatcactgggttcagtctctgcccaaagtgtgagaatccacccaccaagagctggcctcttagctggtatatctactatgcttggcccacggaattcagtggctgtattaattgccctctggagaaagatgtgcctaaccaatgcttggtagcttgaaacccaaggagagctgggcttcaataacaaatacaatggagtaaatagaagccgggacaggccagacgtggtggctcacgcctgtaatcccagcactttgggaggctgaggcggacagatcacgaggtcaggagatcgagaccatcctggctaacacagtgaaaccccgtctctactaaaaatataaaaaactagctgggcatggtggtgggcacctgtagtcccagctactcacgaggttgaggcaggagaatggcgtgaacccgggaggcagagcttgcagtgagccgagatggcgccactgcactccagcctgggcaacagagtgagactctgtctcaaaaaaaaaaaaaagaagctgggacactatggttggggtgatgctcattctttcctccttgccaccaccacctctgcaggaaagatgggctctgtgtgccccggaaatggatctaccacctgactgaagggagcacagatctcagaactgaaggttggttcttcccagccctcaccctcccttgagtttggttctgcatctctgttctcatacttctcccacctgccttgacaggccgccctgacatgaagactgagctcttttccagctcatgcccaggtggaatcatgctgaatgagacaggccagggttaccagcgctttctcctctacagtgagtagggatacaaggcaggaagggttggagggaaacaagggagggcaggagaactcctcactctgggtcctatgacaccctcccaggaagagctaggtgcttccaggggttttgactggcctgaccccaccttgcccttccagatcgctcaccacatcctcccgaaaagtgtgtggaggaattcaagtccctgacttcctgcctggactccaaagccttcttattgactcctaggaatcaaggtaaggggttaaaatctcataaaacaggattaggactcaccaagtcttctggtgttacagggtgaaagaggctcgtgtgatgtcaccagagggatgtggctaagagctgtgatgtcacctgagggaggcaggatgggttctgggctactcaaaagagaggtttctgagtttgcactggataaagggggcagagggtcatacgtggagggaaaagagccttagagactcccctttgacacagggaatgaaagaacacgttctcccccaccccattactatcaactttgcttttctccctggacttcccttctgtccttctttttccctccccccatcacagaggcctgtgagctgtccaataactgacctgtaacttcatctaagtccccagatgggtacaatgggagctgagttgttggagggagaagctggagacttccagctccagctcccactcaagataataaagataatttttcaatcctcatctcattctggggtttgtctccagacgtcattcccactcctcccatttcaacattccccctggatcctctaccacctaaactcccagctggacggtgtcagtaagaacagagtggcagtaactctcactttgtagtggtatatttaggatttgatgtgacacagttatttattgctgagtgagcaaacccctagcccccaagtggggactacaggcttcagtgcttcccccacactgcctgagctaccagcccttctgcactggccctcctgccaatactgcctgcactgtccccactccctctggctcccatgatcaccagatccgccctgcaggctccctgtcacctgtggggccctatccagaccccctaatccacttgcctagcagccccactcttccctcgatggctcagatcctgagatccaaggaacaccctgggtttcccaaccactctcttactgcagaggtctgtctatcctgccctggtctcctccaccccaggagagttttcaaaggtagagaggaccctttggtctttattcaccaccatcatacttttttttttttttgcttttaaaaagtggaggtggaaaaaaaaaaaaaactgaaggtgggagaaaagtaaaagcaaaaataacagctggtgaatccaagagcagtgccctcactgtccataaacacaaacaccctaaatagttctgttctctcctgtgtatgaaggggggccctgcaccctcgtactcgggtttcttccccatccctgaggtccctatgcttacaatttgggtcatgcctcacacttttctcctaaagcccacactctcttcaccctttgcccccaccccacggtcacagcccctttcccgggtctcccctctgctcctcaccttccctctccaacccctcactctcccagtcagtggccgcctcatccccattgggctcccggaggctgacagccagcaccaaggcctgcaggagaccaaagaggcaggcgaagtgcaaagggtgggcagtaagtaggctcagaacagcatggagcccatgcagggcagccaggaaggacagtaggccatgtagccagaggcccagcggtccacgcaggcccagtgtgtccaaggctgcccgcagtggtcgtgagcacagggccagcagggcagaggccagcagctccagaagatgcagggtcaggttggtggagatctgcagacactcttctgggccccccaagtaccgggagggagctcctggttccccccgcagccagcccaacagcttctcacgcctaccaggtttctccaatggggctcctggcccagggacgctcagtcccccttcaggggacacccctggtctcctggtgccacctgaatccacatgatcccatctgagtttgggactggcccctccagcctccagtctcccagactcttgagtgctagagataggctggtcccacttgagggaatccattcttttgctccctagctgctcaacttggggctcctccttgcttggttcggaagcagccccagaaaccctcaatgcccccgagtccttagtcttgggatgccccacatcttccatggtttctggggcactatcccagtcacttcctgaattctccgaggagctgtccacccgtctgggttctgggtaaggcgggtcaggcctcattggtttccggcggccccaagggcgaggtagccagccaccaagccgtcgcaggaacatggctggggtgtgtaatgggcccccaaattctgaggctgcttcctggcactactcagactctcaggatctcctcagaagccagagtctttctggctcagaacaggtatttgcctggtgatgcagtcctactctgaattcagaagtggctcctcccttctctgaatagtcatgcagcctcaagtgtggcaagtagtttgcttcctcttcagttctggggtaaaggggggcatacccaaattcattcaccatccacacccccacaatctgagattccaagaatctcagatctgacaaggcctgggtcaccaccagagagtcctctctgcgtttccggatttccttcccagcaggcagcaccccaagtttcactcaccaaggccacaccccaaggtgtcccagaaactggggaggcagtgctccatccaataaagcgggcaggaaggtggccccaggtcctaggtgctcctggatcgtgtagtctttaactgctgccccaagggacctcaaggaataggaattctctttgttaggaggtggaatgaaagtgtccagcaaactccagccagcagcgttcgtcccttgatttagagggctatgatttctacaaagtggcccgactggcccgcgaacacgcagcagagacgcggcctccacaaggtcagaactaagatgtcctcagagatccccagttacgaagcaaagcgcgggcctacttcgggacctacgcgtccgggcgctgtgcgcggggaccgctcccgggcccagcgtcggggccgcggccttggggagccgccgggagccgcgaagcccggaagcagctgcaccaggactggaaggacccgcgggggcggtgccgcagctcatggggcggaccctgcgaatagaccgcccccgtataccccgcgctgtctgtgcgcgccggaccgccaaaccgagattagcaaggaccaggaccttaatataaacccagctccccattttcccgggtttctcatgcttccctaaactcggtcgccccctacagccccctgcccctgggttcttttccacatcccccaccactcctccatttcgcatccaagacttcatgaaaggctttcccagaaaagaaaaaatgaggagtcttgcgacttgaacagccctcccctgcccgtctgcaaatttgaattcctggatttcacaacagtgagctcttcttgtgcctaccacccggcatgagcaagacaagggggtgggtggtgggagagtggggaagtgtgggaaagaaaagtgtagacaaatgggtggaacaaagaagtttaaagtttagatttgggggctagagttctggtcccagttcaactaagtgtacaagcttgataatcgtgggccttcctatcacactggcctcttccagcaaaaccctacccattctcatctctagaggccttgacttcccttatcaccctgcattataatatttgataacatgggccgggagtggtggctcatgcctgcaaccccagcactttgggaagccgaggccggcggatcacctgaggtcgggagttcaagaccagcttggccaacatggagaaaccccgtctctactaaaaatacaaaattagctgggcgtggtggggcatgcctgtaatcccagctactggggaggctgaggcaggagaatcccttgaactcggggggcagaggttgtggtgagccgagatcatgccattgcactccagcctgggcaatgagagcgaaactgcatctcaaaaaaaaaagaaaaaaattgataacatggcactttccctctccagctgtgaactctttgagggttgggaatgtctttacctgtattcttggcacatagtatatggacttatgtttgtgaaatcagtgaattggctgtagtcagggaactcctcctgggggaagtgagacttgcacgaagctgggcaattcttggtccaggggggttgaaagaataggtgggggactcccaggagggtctgggacctgaaagtgaacccagattggcagggaggtgaccttatcatgccacctggagaggctgccccttctgactcaggtgggacttgcatgtggctcccaggcttctgtttggcttcctcaaaatagcttccagaaaagtgaataaaccacaaatggttgatttatttctgactctcagcccgtctctcacgaagacagagcctattgaccaaaaacttcaggatctgcatctgagcagatcccaggaaggggaagtcaaagggcccaggtcagaggcccaagttcagacttcagcagcagactagggtcagactttaccaaagtcagaactcgaggttcatgtaagtccttagatcccgctcccaagccctgtctttctcctccctccttctctcctccctccagctcagtgtggccacccgagggggtctctccctcccagccacagctcgggtatcccaagctgggaaatgtgtcactcggggctggggtgctgatctgtagcctagtccttcctggtccctcttgaggacagtggggatgggattggcacggccctcaccccggggtcccagccccattcctggctcccagccccccctcagcagcagtttgaagcccgggctggagatgggcaccccaagtggaaggttgggaggctgaggaccctgcgacagtgacagcaggtgagcagtggatgtgcggtggttggaatcttggaagtgggtgtcacagttctcgcagtactggagggagggagtaggagacctgcagagaaagaagaaaaagcattaagggcaggggaaggaaaaggggaagagttgaggcctcagagggggctggcagggtagaataggatcttttcagcttttctgctaaggaacaaattgccagctaggcatagtggctcacgcctgtaatcccaacactttgggaggcagaggcgggcagatggctttgagctcaggagtttgagaccagcctgggcaaaatggcaacgcctgctttttttttttttttttttgagatggagtcttgctctgctgcccaggttggagtgcagtgccatgatcctggctcactgcaacttccaccttagcgattctcctgcctcagcctcccaagtagccgggattacaggcacatgccaccatgtcccggcaaagcctgctttctacaaaaaatatgcttgagcccaggaagcggaggttgcagtgagctgaaatcacaccattgcacaccagcctgggcgacagagtgagatgagtgagactttgtctcaaaaaaaaaaaaaaaaaaaaaagggacaaattgccttccttcctacttaacagtgagggatccaggctggtccaaaggtggtggtgagttatctgaattaattgttcactcagttacagatcaaactccttactccacttttcccctccttctcactactgcacttgacttgtcttaaaaacaaatttctttaaaccattgtgggatccagagcagaatagttgaaagaaaaaaatggtaaccagacctagcaaactcttgggcaaggggagggacattagtcataatgactatagctaacattcatgtattgcatactatgcggcatgcactattctagcattttacatatattaacccattgaatcctaacaacaattcttactacccccatttctaagatgagaaaactggaacatgtagacattaggttgtttgcccaagtaagtggaatcaggctttaaatccagggagctcatgtttataaccacttgactatactaccctgtcaacctacacatgaggataaggaaagaactcttcagcactgtgctggggcgtctggtgtggtgtggctgggagaggcagaacacaatgagacatgggtctgagctaaagtttccccttaccggttttccgggctccttgtctctccatggctctccctgaccatgcgggctacctcagggaagccagcttcttcagcgagctgagccgcatccctgccactcagctcacagacccccacccaggcagccccacggcccaggagatagctcacagctgccccctggcccgctcgagcagcacacatcagtggggtccaccagaaggcatcccgggcgttgatattccccccagctcctcctgcctcatgcggttccagcagtctcctaagttctggcaggtccccctcctgggctgccctcagtatccggtgagtcatcttatcctcagcctcaagggatctcccttgtccatgtcttcctgatgctccttctgccactgcttctgctgctggtgccttcattattcttcttttctttctctttctttctctggcaggttcagtctgagatctctgggagtcaggagcgctgctctcatccccaatcagggcctcatagaaagctcgggctgcagccccatccagggtggactctggcttctcgggctgtggctgctgctgcccatccttccagaggtcgctggggtcagtggctggggtgaaggtgatgagcaagggccgggacatggcttttgggagaactgagaaaatgataccaggcaagggaaggatgagacaagtaagccaagctcgtggtgaccctgtagcaaccacagcctcagagacctgctgggatgagaaaaagtagtcaaaaacactttcctgccactaaagtaaccccacaacttaggactctgcagggcctaagggagagagactttgcgtaaaaacatggaaccctacaataccgactttgctccttagtaaagattaataaaactccatgagactgttgtccagaggtcctgcgtccggcccccacccccatcctcaccaacaataaacaccagcctctttctgaaaccactttcccaccccgtaagacataccagtaggaaaaaaaaatcagcctggccctttaagtcttccgcgatcccatttcggagtttcctcttcccaaacaaaaatagatgggtcactccctagaagatctcggggagagtctcctatacgtgttgctgtgtagcttccgtaccgcaaaatggcgccattctaatcagaagagttgacacaatcaaatagccacacggcacgaagacgcatgcgtggcgacaacaacaacaaaaaccacaacccacattacttgagggctcgggcgtgcgcaaagctccgggttcagtttcccgcgctggaactttttcaatagtaaacgagcaaagctccgcgcgcccaggtggcgcgagcactaggatctgtcggttggggtcctacttttacataacgcccccacaatgcccttcgccttcctcaacgtggcccccgctccaagcccattttctggagccaggaatccactctgtgggttaggaaaggccctcaggaggcggagggaaacctgtggaatgccgagaagccgtgtaatgaaataacgtcacgcctgcccctcaccattactctgaccagggttcgaaggtcacacttagagcctaaggggaaatggagaagtgcaaagggacgagcagaatggctggcaccacctcaggttagcgcactgggacgttccagttctcacaccgcccaccccaccccacccaagtccctacgcacggagccaagccgcacctctcccctcatgaggcaggagcccggaggaaacagtatgcccgtcaagggtctctggcgggactgattcgcactaggggcccaacaggcaataaggacccagcggattggccgaggataggccagtcccctgggcagcagcgccgcgccgggactagaggggaacgtgaggagagctgcggaaagagatccagcctggctccctcctttccccgccctaagtcagcctcttcacccagtgagcacaaaactgtattgcccagactcccgggccccgaacgccatacctggcttccgcttccggtggcttctcgttgtgccccgcccgcaagcgccctcctccgggccttcgtgacagccaggtcgtgcgcgggtcatcctgggattggtagttcgctttctctcatttagccagtttctttctctaccggggactccgtgtcccggcatccaccgcggcacctgacccttggcgcttgcgtgttgccctcttccccaccctccctaatttccactccccccaccccacttcgcctgccgcggtcgggtccgcggcctgcgctgtagcggtcgccgccgttccctggaagtagcaacttccctaccccaccccagtcctggtccccgtccagccggtgagtctgaagtcgtcgctgctccgagtcccttgtcgctgggagcggcacatggggtctccggactttgatgtgggggcgggggaggaagcgaccaggtccggcacgaaggagggagaggtggcctgaggagcggaggggggatgtgtggattccggtgaaagggacctgacaatcgcccccaacccgtgagaaaaggaggagcccagttcttgcttgagaatgataaacttggaaacccttgggaaaggcgtgggggtcatgcagagacttgtattggtagggagcctgagtcgaggtccctgccggagttgacacagaggagagagggccctggccttcgggagctccagggatgtgggtcgggctggtgggtcaaagtatctgttggcttctttcaagtggtgggaccccaaagaatgtttaacttcaaagaaaaggggctgagatgtaaattagaggagctggagaggagtgcttcagagtttgggttgctttaagaaagggtggttccgaattctcccgtggttggagggccgaatgtgggaggagggaggataccagaggcagggaaggagaacttgagctttactgacactgttctttttctagctgacgtgaagatgagcagctcagaggaggtgtcctggatttcctggttctgtgggctccgtggcaatgaattcttctgtgaagtgagttctcttcaacctccctacttgccagcttcacatatcttcccaccagacgttccttcacatattccacttctgcactgttctcttacatgctatttgaaaacttcctatcagcaaagagtcccccctataaaccccgacgaacctgtgctaaagtggcaaaactggggcccaagtcctgagtctgccaccgtccagcaatataacgttgggctagtcaatttgtgtctttttcttttttttgagactgggtctcactctgtcaccgaggctggagggtagtggtgcgatctcggcttactgccacctctgcctcccaggttcaagcgattctcctgctccagcctcccaagtagctgggattacaagtgcctgccaccatgcctggctaatttttgtatttttagtagagacagggtttcactatgttggccaggctggtctcgaactccagacctcaggtgatctgcctgcctcggcctcccaaagtgctgggattacaggcgtgagccattgcgcccggcctgtatcttttgttactaaagtggcactgctagtacttgtctcaggtggcctttaggaaaactgaaatgctacacattgaaatgttttgttcagaaaccatgctgttcagcttccaccttccttagccagctgagaggacaaaactggttcctagagacgggatacaggagtggagtagggacaaagatcttgaaaagaatgtctaagaaaaagattgctgtatctacttatccttagaaaagaaaagccaaagcttttatgggagagagtgtaggtgaactagggagagacacaagtacttctgctgagttgggagtgagaaacaagcacaacagatgcagttgtgttgatgataaggcatcacttagagcattttgcccaggtcaaagatgaggattttgatatgggttccctcttggcttccatgtcctgacaggtggatgaagactacatccaggacaaatttaatcttactggactcaatgagcaggtccctcactatcgacaagctctagacatgatcttggacctggagcctggtgaggcaccctcagggttgttttgtgtgtgtgcgtgcactatttttctcttcaaatctctattcacttgcctgaattttgaaatttcctttggttctctgatttctttaaccccaaattcatgctttattttgatcctccacctgactcttgtctagttttgtgacgtatatcacttgttctcatgttttctaaatccgcaattcagacctattccaaaatgcgtttcctcatgggtctggtttgttgtctgtttctcctgctttgcaccttccagtctagaatttcatcttctgcattgacattgttgcagttatgtattgaggagggagttgggagggagagcaaggagcagaggctgaaaaggtgtgaagggaaggcagagctgtcttcgtttgatgcaagggtcagaagcccaggtttctgggtcccatgcccagatgttggatggggtaaggcccaaaagtaggtgctaggcaaactgaatagcccgcagcccctggatatgggcagggcacctaggaaagctgaaaaacaagtagttgcatttggccgggctgtgtttcagatgaagaactggaagacaaccccaaccagagtgacctgattgagcaggcagccgagatgctttatggattgatccacgcccgctacatccttaccaaccgtggcatcgcccagatggtgaggcctctctgctcctacctgcctccttctgagcagtaagagacacaggttcctgcagcaagaagtcatgtttaagccctgtttaaggaagctagctgagaagaggggaagaaccccagaacttgggcctgggaattgaattctgattgggggtcatcctgaagggattgttttcagggagggagacagaccttgaatcagagagttgtgatagactgcctcttcctcaaggaacaaacaacaaatggctctgatggtttgtagcctgcctaattggaagaaaggcaacacagaagtttgagagcccatctagtccagagaaggggcctctggacagaggtgggaggagtgggggacagagtggtatgggttgggctgcgaagggagttgcctcttctttacatctacctgccaaccccttccattgtattcacctcagttggaaaagtaccagcaaggagactttggttactgtcctcgtgtgtactgtgagaaccagccaatgcttcccattggtgagtgttgaagaagggaaaggaaagcaccgtgtggcagtcttatgggaaggagttggggctcaacacattggagcctgagtcctgaggggaggttaggtaggaatagggggatacctggcctgctgagtctggctgtctcccaggcctttcagacatcccaggtgaagccatggtgaagctctactgccccaagtgcatggatgtgtacacacccaagtcatcaagacaccatcacacggatggcgcctacttcggcactggtttccctcacatgctcttcatggtgcatcccgagtaccggcccaagagacctgccaaccagtttgtgcccaggtagggagcagggagagtcattaagggtcaaaggaaaggcccaagatcccccagagaggggaggacagggcatggccctttcttgaggtctgcttctcccagaatcagggcatctccctgctgagtgactgtgggaaagttatttgattatctgtgcttgagttaccttattgtagaatgttcttgagctgagaagttgggaaccacgaggctttagctctgagcaggtccatagaggagctcaggtggggaggtgggaatgcaggtgactggcagggcctggatggggctcatgctgctgcctctctgacctctgccctggcctaggctctacggtttcaagatccatccgatggcctaccagctgcagctccaagccgccagcaacttcaagagcccagtcaagacgattcgctgattccctcccccacctgtcctgcagtctttgacttttcctttcttttttgccaccctttcaggaaccctgtatggtttttagtttaaattaaaggagtcgttatcgtggtgggaatatgaaataaagtagaagaaaaggccatgagctagtctgctggtgcttgctgttggggaagggaaggtgatggtgtgttggactccaggggccctcatggcccagcccaccctccccagattgaaaaccaggacagatttgtgctcagtggattgggtggtgtttttagtatggagcagaacagaattcctaggactgcgtgtgatgaaatgcaaggtcaaaaggaaaagacaaagcatatttcaaagatgagaaatatttgtttggatatctatgactgtctgtttatactgtaaggggcttaatcagcagctccatcttttagttttagttctaaaggaaaagtagcctaaagtcagtataactaaagggtggaacgaggtgggacaaggtccggaattgctgctcagtgatgtgtgtgtgcctgccgctggtggagctgagactgctcatctcagaaggatggggatgcttgatttcctggccaggttgtcccagcacagtggggattggccctgttgtatgacgaagacagcacatggtggcagagatagatactaacccatggactttccaagggagggaataggtctttggagggtatgcaagacaaaggtagacactggataaagaacccggtagtgcccaggtattaccccatctgggccattactcccacactcaggaaccagacgttgtgggtgaggacatgctgtccctcctgccaagtaataacttccttcccagccaggatcctgccccaagtaggaatatagctctgcatttacagcagctcctgctcagaccttgtcaaaaccaccctgcagcttaggattaaggagcatggtcacaggaaggtggggtttcagggcatcccctcaggaactgcccatctccccagaattccaaaatgaaggtccatatgcttgtaggtgtgctggtcatggtgggcttcacagtaggaaagggtaagtggggcccaggggcagggagggaggaaggggtaactgagtccaggaagggggtggagcgtggccatggataatcgggcttcctactggcccagggtatttgagagtgacccagtgcctccatccctccttctgcctccccagttcctgttcccgacatccggacgtgccacttctgcctcgtagaagacccttctgtaggatgcatttcaggctcagagaagtgtaccatcagcagctcatccctgtgcatggtgatcaccatctattatggtaaataaggtcccaggaaggggctgctggtggggcagccaatggcttggtcttctctcctctcacagatcagggctgctccgggcatggggtacaagaagagaggaggggctgagtgcaatggctcatgcctgtaaccctagcactttgggaggctgaggcaggtggatcacttaagctctagagttcaagaccagcctaggcaacatagtgagaccctgtctctacaaaaaaatagccaggcatggtggtatgcacctgtagtcccagctactcgggaggctgaggtgggagatctcttaaactcaggaggcataggttgcagtgagccaagattgcgccaccatgctccagcctgagtaacagagctagaccctgtctcaaaaaaaaccagaagaatcttggaaggaggggtctaaggttctagggggccagcagagctcacttttctagcctcttgaaggactctgggttagaagtaaattaggtctgggtgaaggatgggaaaagtcagtagcaggggttcttggactatgggaagctattggaaggggttatcagctttcccctctccctcagatgtcaaggttcgcttcatcgttcgaggctgtggacagtacatttcctaccgctgccaagaaaaacgcaacacctactttgcagagtactggtatcaggcccagtgctgtcagtacgattattgcaactcctggtcaagcccccaactccagagctctctgccggagccccatgacaggcccctggccctgcctctgtctgactcccagattcagtggttctaccaggccctgaacctctccctgcccctccccaatttccatgctgggacggagcctgatggcctggaccccatggtcacactgtccctgaacctgggcttgtcttttgctgagctgcgccgcatgtacttgttcctcaatagttcaggacttttggttcttccccaggctggactcttgacacctcacccttcctgaattccacagtgcaaatatctttctgtaacaccctcagcatcctgcactgccctctctgaaaacacccacattctttggtcactgtgatttcttaggcctccgtctgttgtaccactagcatctatatgacttttgtgtaattttctctcttgaactctggtgctgtttttttgtttgtttgagacaaagtctcgctctgtcacccagggtggagtgcagtggcatgatctctgctcactacaacctccacctcccgggttccagcgattctcctgcctcagcctcccgagtagctgggactacaggcgtgcaccaccacgcctggctaattttttgtatttttagtagagacggggtttcaccatgttggtcaggctggtctcgaactcctgacctcgtaatctgccctcctcgacctcccaaagtgccgggattacaggtgtgagccactgtgcctgtctgagctctggtgctgttcttccccctagaaaagaatctctagtgtggattctgcccagacaggctgacctgagaaaggcacagtggttcctccattccttccccatcatctgagtgttccagtatcccccatccctctcaatccagtcacctgcctattgacatctagctctgtttcccctgtcttgtccatgtctctaagacccagtaccagactgaactagcagcaagaaggacgaggaggccgggcatggtggctcacgccggtaatcccagcactttgggaggccgaggtgggcggatcacttgagattgggagtttgagaccagcctggccaacatggtaaaacccgctctctattaaaaatagaaaaatcagctgggtgtggtggcacacctctgtaatcccagctactcaggaggctgagacaggagaatcacttgaacccgggaggcagaggttgcagtgagccgagatcgcgccactgcactccagcctgggtgacacagtgagactccgtctccaaaaaaaaggatgaggaatagaattctgtgcagatgtcctgacttggcaattttgtgtccctgcctcactgtctccaccaacccccgcctgtcctagtgttgttctgcctcctgtcctctcttgctctcttgtcagtctctggcttcctcggccccatttcacttcactgagtcctgacacccatctccctaggggcctgtgagaggagagggaagggtctgttctgctcagctccatgtcccccattttcctccacaataaactgggactgggctaaaactgtgtcacattgtttgtggggtcaggctcaggtgtgggcaggtaaacacagattaaagagggttaatgcctggcgcagtggctcacgcctgtaatcccagcactttgggaggctgaggcaggcggatcacctgagattgggagtttgagaccagcctgactaatatggagaaaccccatcgctactaaaaatacaaaattagccgggcttggtagcgcatacctgtaattacagctactcgggaggctgaggccggagaatcacttgaacctggaaggtggaggtggcgatgagccgagattgcaccattgcactccagcctgggcaacaagagtgaaactgtgtctcaaaaaaaaaaaaaaaaaaaagggttagtgaggtttgggatccaaataggattgcagagccctctccattgcacttggcgtttgtcgcttcctctcggcctcctgtaaagggcacacatccctccccaccctctgcttagctggagatcaaagcatggggactgtgattcttcccagccttaaacataccctacaaaacctggaaagttagaccctgatgatgccaggtcttttcacctaagaaaagaaactttaggccaggtgcggtggctcatgcttgtaatccctgaactttgggaggccgaggtgggtggatcacctgaggtcgggtttgagaccagcctgaccaacatggtgaaatcttgtctctactaaatatgaaaaattagctgggcatggtggctcatgcttgtaatcccagctacttgggaggctgaggcaggagaattgcttgaaccggggaggtgtaggttgcagtgagctgagatcacgccattgcactccagacagggcaacaagagcgaaactctgtcttaaaaaaaaaaaaaaaagcctgggcgcggtggcttgcctgtaatcccagcactttgggaggccgaagcaggcggatcatgaggtcaggagttcgacaccagcctgaccaacatggtgaaagcccatctctactaaaaaaaaaaaaaaaaaaattagttgggcatggtggcacgtgtctgtgatcccagctactcaggaggctgaggcaggagaatcgcttgaacctgggaggcagagtttgcagtgagccgagatcgtgccactgtactccagcctgggtgacagaccgagactgtctccaaaaaaaaaaaaaaagaaactttctctttaaaccagaaagactcaggaactcagagccacatgccagagttacctgctgctggggccctggactcctgccattccttagttcttttcaaggattctggcatccaggatgccctctcgaggggcccaatttgaggggcaaagtgctgagagcactgatgttgggctgcagtggttggatcttcatgctaatattttaattttgaaatagtgcaaacgtatagaaagcaaggatggatacaacagccttttccatacactggataaacatgctggacataacgctgctctgagtcaggcttggtattgagcagcaggactcccagatgagtatagccaggtgtctgcccttccaagtcttgcagcccagtgcttgggttatgaaacctttttctgaaaagcagtgcagctttgtggctgggaggtccaatcccagcccctctaccacttggatatgtcagtctcttcagccccaccttggtcacctgtcaagtagggatagtgcctcagatgattgagaaaacacatgtaaatgtgcatacacaagtagaagttaaggccttttccccctcaaaaaaatatatttgccctagagtcaaatgcatacacaatgttcagcttttttttctaaggttcttactatgttgcccaagctggccttgaactcctgggctcaagagattcttctgcctcagcctccaagtagctgggactacagatgcacaccaccatgctcacctggctgatttacttattttcaaacctttttggtaaaacattcagaagcttgcacatatcacaagatggatttttgtaaaccacacatctgtgtaaccagccaccaaatcagcgtgaagacctttacctgcagccaagcctgcctctgttcccctctcccaggtgctcttcccagctctggggtagccgctgtcctgactggtagtagcttagatgagttctgtctgtgcttgatggaaatggcatcgtacgcatctgcttttacctatatagtgttttgcacacgtgttaacaaatctgtgtggcctgtactctgacggaaaataccaaaccaatgataattaagtcatgaggcagttggcgtacaaagagaggtacaaacccttaatgtgccccccaacccccaccttgctaagtccacccttctccatgacctctgacgtcagtataagacagagaaaggcccaggtttatagcaggtcaacctggaagacaccctcagaggctgaagaacttggcccagaattgaagagaccaggactccaataaggtctaacatctctttgagagtggccttctcggctcggggtgactcacgcctgtaatcccagccctttgggaggccaacgcaggcagatcacttgaagtcaggagttcgagaccagcctggccaactggtgaaaccccgtctctactaataaaatataaaaattagccaggtgtggtggcatgtgcttgtaatcccagctactcgggaggctgaggcagaagaatcacttgaacctgggaggcagaagttgcaatgagccaagatcacaccactgcactccagcctaggtgacagtgagactgtctcaaaaaaagagtggccttctcacccacctccttctacctgggcctggtcctttcgcagcccccttcccaccaacatagccctctaaacgcccctagcccccacacagctctggtctgacagcactgccgaggatgcccactaactttctggcattcaccataggagggctttcatttcctctttctctttttgtgtctagagcaaatcacataccaaggcaggacaagaggacagctcagcagagctgggggtcccttacctgacccatggtagggcagttaggcaggtgcacctccctcagccttcacctccaccagaagaaagagacataccaaacagtttacacacaaatttatttgggagaaacatccagggactaggggacaagagaggaaacctggtgggcagtagggctgggggtacagagtagcagtaagtgtgctgaagggcgtcaaccaagaggaagagccaaggctggggtccagtggctggagggaggcaaggagggctggtatgagggactagaagtcctggccaagcccagatagaagtcaggaaggtggctggaaactggtggaattttacaccaaagtttgctgcagtcacactaaggagtatagagccctctgttttgagggtcattgcagaaatccaggaagcagtattgagagaatatccagaagccagacaccggagaagttcgggtatttgaacaatcactcatctgctccttacttcggcagtcactcaccatgacgtcagaaccgctgcctggggagggacagtgggcaccagtgatacggaagtccccaggaagagccccaaatcctctcatccccacactcataagtcaaaaaaaaaagaaaaagaaaagattcctgtagttaggcatgggtggacatgcccagtgttcaccagccatggaactccactgaagttcccatgcaaggctggaggaaaagagccatatgaaatgtaatggttggagggggagttgggagttactgagccaagtgaggagaactagcaccataggaccatgtgagaaaaagctgggaaatgttttggagattgggtggcaggaaggaggtgtattgttatttatttttcagaccaaaagagaataagatgatgtctgctgctgttatacataatagagaaaaatctttgtgcctgcatcccaagaagtcatgttcagggatgtttgctgctgccctgcttgagagaaatgaccaaaatgcccatcaatagtgggatggggaaatcagctgtgatatgcgcatgctatggagtagtatacagcaggtcaataaaacaaggaagctgtttacaaactgatatcggaacattcagttcccctaacttaaatgtggaataatgtttacagtgggatgctactatcttgggttggggcgggggaagaggtgaaaaaatagtaaacagcatatttgtgcagggtggaatgtgcataaaagattgcaggagggatcatccagaaagtaaaaaaagtggtcacatgtgcaggggagccaggtgggttagggtagtagcgggagactttggtttgatggtattgtatactctgatatttgacccacatctgtgcatcggctatgttaaaagggtagtaagaggacttgaacacaggcagctgcatgcagtggttgttgagagcaccatctctggagccatcacaaattctggctcagcatctgtgagactcaggcaaggttatgacctttctgcacctgtttcctcatctgtaaaatgcacatagtaataatacctgcctcagcggattgcaagtgtttagaacagtgcctagcacatattatgtgttacgtttttgctaacttaagaaaggtggggggtcggtggaagagcaggcatcgggaaggagtcaattttcagcgagggagatgtccagtggtcaacgggatatgaggagagcggtttgacataacattcagattcagaaggaagtggtatgtggctgctggttgaagccagcaaagcagataaaatcctctgcttttgagtatatgaagtgggaagacagctaaggaccaaaccttggtgaacatgaaccactaagggtcagagagaaaacgctccatgaaggagactgaagaagccgtggaggatgcaggagaagagcaacaccagcagtaactgcagacagatgcggaagcagacagcttgaggacaggcaagggcacctggagatctggagggtccccgtcaaagctgcgcaccttgatagggtagaagctattcagctacagattgaggagagaaggttagtggaagtggagacagagtgtggctctgaagaaaagggaagagaggctgggcacggtggctcacgcctgtaatcccagcactctgggaagctaaggtgggtggatcacctgaggtcaggagttcgagaccagcctggccaacatggtgaatccccatctctactaaaaatacaaaaaattagctgggcgtggtggcgtgcacctttaatcccagctgcttgggagactgaggcacaagaattgcttgaactggagaggtggaggttgcagtgagccaagattgcgccactgcactccagcctgggtgacagagcagcaaaaaaaaaaagacaggattggagcaatgtcttatgggattatgggaacaagacttggggtgcagcttaggaggctgagagagtttccgtttgggagagtgctgggcccatgacaggagaaggccacttactgttctttttgtggagagtgatgcagctgctgccagctggggtgaggcagatgtcagatcccagaaggcaccctaactccttggtctccaagaggcatcggtagcagcgcaggtatttggggaatggaagtggttgagggggttcccaattgacaggaacaaacttacctagaacacagagaagtgctgaccccactcacaccccattctacctcacaccctaccactgcctgattccaggccactcagccccactcctccctcccttcctgtctcagaaaaccatcaaagccccaattctctgcttccttccccaactgcatacacatacatcccccttttcctctggtcctaaggccagaccacatgttaacaaatccccagacccagcagagcacttggtgttaggcagaggaaagtgctaaaccaacactttgaatcctgtgtctctgtggctggtgctttgcagccaagtggggagcccagcaggctggactcagtcttgttctatcctgtggattctggttttctcatccagcacactccctaaccctccctattctatgttgccctcagatccagagaggattccttcagtatctctattcaggtcactgctgtgaagtgagacagccctggggtggtcactagaaatctccttcagaggctgggtgcggtggctcacgcctgtaatcccagcactttgggaggccaaggcgggcaggtacctgaggtcaggagttcgagaccagcctggccaacatggtgaaaccccgtctctactaaatatacaaaaattagctgggcttggtggcttatgcctgtaatcccagttattcgggaggctgaggcatgagaatcgcttgaacccgggaggtggaggttgcagtgagccgagatctcgccactgcactccggcctgggatacagagcgagactccatctcaaaaataataataataataaatttttaaaaatcttcagattgcacatcagtccatgagcaggcattccctaccaaacccatctgtcccatctctcctcctgcatgggtttacctgagcatcctggacaggtgtacccagacacttggtgtctgtgggtttctccatccaggccaggagacccttctgaacccttggagccacttaccaaacaccaagctcatcatgaccagcactattaagaggaccgtgtagagggcttgggggctgctgtggaagcacaggggacccagactctggctccctgcagggcctgccataaaacgcatgactgcctgctggcctccagtttgggcttatattggtggaagagaggttggccaagaggaaggagagaggcaacaccagctcagggtggaaatcagtgccagaccagccagaggggcagaatgttcgcacccacagccactctggggcataacatcctgcttgagggcaggggaccagcaataggggaatgagaaaaggaactgtctttcctattaattggacagatgtttattgaatcactgcatcagatgctggggatacaaccctgcacaaagtctccaccctcacagggcacagtctagtaggggagacaagtccaccagcaatgatgtggggagggcagagtgctgccaggagcacctcgacagttaaaccactgaccagagggatttcggcagaggagtaacttgatcggatttctgtttataaaagattgccatggctgcacattgcatttgggtcaagagtggaggccgccgggaagtaggacgctattcccgagtccggtcacaagatggcggactggtccggcagaagacgagcagggacgaggaagcggggctaatgaacctgagatacagttagaagactggacagatttgctgttggactgaacgaggggtgagggaacaggggtaggcttgcacaaggaagtggtaccattttccaagataggaaacatgtggtctgtctcaaaaaaaaaaaaaaaaaagcaaatagggggtgcccagtcccacttctcataccctggggacacctgtcagacatcctaaaacaaggacacctggatcccaagcgatacgtactcagctcagtgctcccttggggttccaggaacccagcgccttccctcacctcatcctttttcctgccccgcctgtgctcagctgcggctcagtgggcctgaactccggagcccacagaatctggcgctgggcgtccgctctccgcgcctgaccgcacctcagaactccggtaggacgggggggtggccccccgctcaagctctgttccctggggaagaaacctggaaagtgcgaaccgcgcgtcgggacccaagcgtcgggccccagcggacatccggagcccgaagcggctccccaggaaggcggcgccgtagcgccactctccctcccaggcgaattctggagaccgcggccccaggcgtctcacccattttctccgctggggacccgctgggctccccatccacgcctactcggtccccaccccaccagctcagtcttgactcagaaactcagggtttttacttttaggatcgttgggctgtgcgttaggggaggaggtggtcctcagcgtcctggaacgacaccacctgctccaatttcccgtctggaggttctggtcgaggctccgaactcgggttccctgctacctcccagactattcaagaattatccagtcccaggatgataagggggaagatgggaagaaacagacgggagacgcccgcccagaaagactgcgggaagaaagaaattcgagaggaaactgcacgccactgagcgcctcccaaaagccttggaatgaatgaatttaaaaactatattagggccggactgcggtggctcacgcctgtaatcccagcactttgggaggccaaggcgggtggactacctgaggtcaggagttcgcacccagcctggctaacatggtgaaaccccgtttctactacaaataccaaaaattagccgggcgtggcggctcatgcctgtaatcccagcactttgggaggccaaggtgggggatcattcgaggtcaggagttcgcaaccagcctgagcaacatggtgaaaccccgtctctatcaaaaaatacaaaaacattagccaggtgtggtggcgcacgcctgtagtcctggctactcgggaggctgaggcaggagaatctcttgaacctgggaggcagaggttgcagtgagccgagatcgcaccactgcactccagcctgggcgacagagtgagactctgtcttaaagaaataataacacaaaataaattgtattagagaaaagccagagtagtggagaactgcagaggaacgcggggcacctacataaatgtcttgaatgaatgagtgcacagagtgatagacaaaaagaatcagagggccgggctccgtggctcacgcctgtaatcccagcactttgggaggccgagctgggcggatcacaaggttaagagatcgagaccatcctggacaatatggtgaaaccccgtctctactaaacatacaaaaattagccaggagtggtggcgcctgcctgtagtcccagctactcaggaggctgaggcaggagaatcgcttgaacccgggagacggaggttgcagtgagccgagatcgcgccactgcactccagcttggcgacagagcaagactccgtctcaaaaaaaaaaaaaaaaaaaaaaaaaagagagccaggggctcctcttgaagcgaagagggcaaagggcaaaggggaagcacaggggaacttcgcggcgccctctgaagctccctctcgaatataatcgcaacgaaaaggccaacgactagaggctttgcgaggctgaggctgggcttcgggaggggattgccctgagaggtccgggaggacttgctgtggaattcaagcgaccgtgggccttgagggaaccggggggcaagacacccacccagcattcgcggaatatttcctcgaattatttcggggaggggtgaggccggggcagggtggggccttcttcggagggggcgcggcctccgagtaattaatcccgtctttgttgcgttttgctcctctcctgtccacccagcagggccagcccagggcgcgctaagagtccagagagttcgtttccatggtgacgggttccgcgaaggttttcctggggtgaagaggcagggcgttgaataatcgccatggcgacagcagcagatgacggtgtcccttctgagtgctcctacctagagttaagggatacctgagggtaagcaaccgagtgacgaaacaaagaaggcggggcctgaggacagaacgccaaggttaggggaatggagccaggcaaacgaggggcggggctgtagatgacccggtcgggagagggccacggtttgttgggggagcggctcgagattgcgttctagagaggaaccagagagagggtctttaacctaaatataaatgaatgactggattcctgaagaatccggaatggcttgttgattggatagatggatggatggatggacggacggacggaccgatggatggaaatctggctatcactgacgcctgagctccccaccctcttgggccctccacctccggagccctcactcgcttgtgacagctgtacgagaaatacatgcctctcctaggagcaaaccctcaacccaaacaggcagcacagagccagtccagcacctcacactggaggcactcagggtggagcccaggtcgatgagacggcgtaggatgaggctttttggcccagctgggaaccacttctttccagatttcccgtccagagtctaactttcctttctcccagcgccatcttttctgctagtttgcccagctcctcagggtgcctggactttcaggcctcaccttgtgtccagtatagcagggtccagcgccccagcaactgggaaggtctgcatctctgctgatcatcccctggaactgctggaactttgctatatagggtgaggagtggacaggggcctgcttccacccctgggtggggattagttctgaaaacaaacacagctgctctgaaccttattgcatagggagtaatctgaagtaggctgaggcccctggatgggggggttcagaattcacatgttgagcctacctttctttccctacccaatttcaggtatctaagggcccctcaggtcatccactgttgtctacaattacatgcagtaagatgggggaaagtggcagtaggggcagttcagcagagtccctaatggccatgtccagggaggggtgtcctttgtccccagggtatgggaggtgagactgggcacccctatttgctttttttttttttttttgagacagagtctcactctgtcacccaagctggagtccggtggcacgatcacagctcactgcagcctcaacctaccgtgatcctcagccaagcgatcctcttacctcagcctccagagtagcttggaacacgggtgcatgccaccatgcctgggtaatttttaaattttttgtactgatggagtctccctatgttgccctgtccagtcttgaacttctaggctcaagtgatcctcctgccccagcctcccaaagtgctgggattacagatgtgagccaccatgcccagctcctctttgcatttaaggagcttcccttagctgaacaaaaatttagttttcaggggattaactcttctgttggatctgggaggatgggattcagaactgtgcagctggctccagagcttcatgttccacacttcccatcgtttgcccccctggaatgggatagaggagagggcaccagtatcagctatccacctgtttgctaacggtggagcattatggagctgtggtcacctgcctcttctaactccaaatttcaggcatcacatcacctgattaagtctcagatctccacttccagtggagactcagtatatcttcccttaaggagttgcagcgctaatgggggcacacacagcctctgccctggggtttcaagaagagcttcatgcactgggtttggagaagacacagaaatttagccagagactccatctaggacattagaacattgtcgcccacgttaagtatcttgctcaaaagaatggagttggccgggcgcggtggctcacgcctgtaatcccagcactttgggaggcagaggcgggtggatcacgaggtcaggagatcgagaccatcctggctaacacagtgaaaccccgtctctactaagaatacaaaaaattagccaggcgtggtggcaggcgcctgtagtcccaggtactagggaggctgaggcaggagaatggcgtgaacccaggaggcggagcttgcagtgagccgagattgtgccactgcactccagcctgggtgacagagcgagactccgtctcaaaaaaaaaaaaaaaaaaagaatggagtcggctgaggtgggtggattgcctgagctcaggagtttgagaccagcctgggcaacatggtgaaacctgtctctactaaaatacgaaaaatcagctgtgtgtagtggcacacacctgtaatcccagctacttgggaggctgagacaggagaatcgcttgaacttgggaggcagaggttgcaatgagctgagatcgtgccactgcactccagcctaggcgacagagtgagaatccatctcaaaaaacaaacaaaaaaccatccccaacaaaataaaacaaaacaaaaatggactcagggcgataaactttggggtctttcatctggaaaagagaagtttccaaatgaagaaagtggccagcggccaggcgcagtggctcacacctttaatccccaacactttgggaagccaaggcggttggatcacctgaggtcaggagttcgagaccaacttggccaacatggcgaaacctcatcttcactaaaaatacaaaaatcaactgggtatggtggcgcatacctgtaatcccagctactagaggggctgaggctggaggatcacttgaacctgggaggtggaggttgcagcaagctcagattgtgccactgcactccagcctgggcaacatagtaagactccatctccaaaaaaataaaaaaaactgccaggcaacaaaccaatgggtggaagagggatttattcactgtgttccacaaggtccaaagttagagatagatggcagttatagggaaccaatttcctcaggtacaacctaagcatcttctcctaacagagccgtccaaaaggcaaagtatggctctgagaagacatgagtccttggcacctggccctccgtccctggcagggcctgtgtttgttgaactgcaaaaaggctgtgaggacagagacttgatgacatggcaaggtgggtgtgcagggtttgctgcataagacgtggggagcaggcccttcctcactcttcaccaagataacaagaggtgagcaatgaaaattgggggtactgctagtaacaccatgcaggttgaacctggaaaccagcagaagcactgggtaggtgaaatcggatcctagaaagctcatgagccgtaagcaggagggggcaaccatgggctcctggggtggttgtatgcaggaagaactgaagaaggaggcgggaggggccagggaggctgcacagttgtgataacagtaggcacatcagggaccggggaggtttggggacctgctgcctgaggaaagctcaggttaggggctgaaggcctagggggacacagagatgggaagggttagattagctagattgtctagagttagggtttcccaaagcccagctctttggggcctctgctctccccactacctgcccctggctccctggacacttgagaagttatacaattagcctgatagtagaaaaaatacctttttattaattattaggaataatccattcatgtaatgcaggatgtatgttggagaaggttaagtacagccacatgaatgaggggaaacgtgcaagaggaacagtggtgagaagggggatggtcccccactttccacaaactataaacagcaacatgaacacagagaatcacaaataagagggtctttcctcatgtctcctctcaccccattcttccataatgagtcccagttggtccctagaggtgccagggcatctggaagttctgggctgggagtggggtgcagtgagtggcctcaaagttgtgcagatgcttccgagcctgaggaaaggaggtgggacaggtggggtacagagcactgttgggaggggcagccactggactccctccccaccctccacttccgcatccaccacccactctacaaaagctgccacttccaatgcttatagggtatccccagtccccctatgtgagccctggccattcaagaacccttcccacttcccactccttagctcaccagaaacaaagccagctgccgccgtccatctgcactcatgtcctcccctgcagagaggaggcgctcaaaataggccacacatctgggtattcatccccttcctaggcccttcccaccctctctcctgccccaggagctccttacccacgctccaggggaagtcgggcccgtgttctgcctggtaggagcggaggacagacagacaccagtcctcttccacctcccatcggctataaattgaggctggtcagggagagagatgacagccagtcagcaacctgaccttgctgggcccccgccccaagcctcactggatcccttctcaccttcctccagctgtgaggaggcctccaaccactgcctcaccactcgaagaccctcctctgccatcacccggggatacctacggaggaagtgccaggacaggtcagggctgattttttttcattcaccatccctgaaccttcctccctccttccctgtgctggtatcagtatctgtgtgtgtacactgcccccagcgcgcacacaccctggctctcaccgatgctgcaggagcttcagcaggaggtcattgcctcggttggacatgatgtcctcaggaaccctgggggtgagaagaatgtaccctggaggggctggaggttaggaggaagggtctagatacccaggtttctggtgggcagaggtagaagggacaagttcctggccatctctggggttcctgagggccgagattcccacgcactcacgtggtggtgatgatctcatccttggttctccggatcagcagtacaggaccctggtatcttcagagaacagagcagtgggaagggagagctcagagggagacgggtgacaactggcccacccctatccctgcactggtagcattcttaccctccccttgctatagcacagcccttgacctagcccttcactcaggggtgagaggggattatttaaggggcatggttcagtctggccctgctgggagacccctgccgtgccaggccttaaccctttggttgccagatcctgaggtggtccagagtcccaggggacctgggaggggttaggccagttgaggtggtggcagggtcactcaggatgtgagccagtggccttttaccaacttgcactttagtactagtttcagggtttgagcgcccagcagagctgtatggggggcaggtgttcaatgccggacgctggccggccctcacctgcacagctgctccgcgttgtttagattgagatgctgcctcacggtcctggtcaccaggccccctagagtgggataaaggtgaagggatggcagagacaaagcccttgcccaacataaaggtcctcactattcacggagaaagaaaactgaggcccccagacaaaggagtcctcctgcttccaacaatggggcgacttactccccacccaagaaaagggagccatctcagaacagttcccagttccagcccaccccttcccaggaagggcaggcctgggagctgcactcactccagctgtctggcatgaccttcaaggccaagggcaccaggtcatcaaaggaggcatccaggatcatggcactaacatctgggtaggacatggctgcccacgtggctggtaccagggcagggaagaagagtaagaactgagaaaggctcctttctccccaccacccatgctctcatcccactgaccctataggccaaccccattccccctatgttatcccttgtttttttcttaacctacttcacttggttagggaactatctggagaggatggggatagaacactggagatagtgcactgaagataatgggcaggaaacattcactttccctgatctccccacccaggacctgggtctgcttttccttttaatgactgggcacaagaggggaaggaaaggtgaagtgtatgcaaataggatagcttcttccaggcccactcagagattctacttcctctctcttcttccttgagcctccaccccaccccatttccccacctctcccgggtggggctgggtggtcatgaatgtgtctacagtgggggatgggagggaggctggtaccagtgaagccgccgatggaccaggcgtagatgatgatgtcctggggctggaagcctaggcggtggatggcaaactggaccaccacatccatggcattagcctcattctgcgggaatggcaccccctgcaggagaaagggcaaagtcaggagtgtgtcagcaccaaaggccagctcacctgtccctcccaacgtggacccctcctgcagccacctatgacaggcagagaaggtgtagaaggaagggatggtaggagaggttgttctctccagaagacggatgtgtacaatgagatctacctcctcctctcctgctagccccgcactgtggggatgggggcatggctcccaatgctgccttcacaacctcctagaccccagccctcaggtgagtgggacgccttcaagaaatccacagcccctctcctccctccaatggctgaccagagggaaacagacataattcaggaaaaggaagggattcctgagatggtctcaccgtgcttccagcaaagcctggatgattccagcccaggactgaatatccagctgtaacacagggggaggagggactgagaccttgtggcccacagccctttctccatccctgggggaaggaagagcagaagtaccccccagcttagatgcaaataactccaagccttcccagaaataggagatgacaccagaggttctgaggcagcacagggagcagcatgtgattgtgtggggtgtgtggtgggggaatggaacagaatgaaaagcataatagctagggacacaggccaggggagggatgtaaggttatcaaagcaaatggcgagtggacttttccctaaagctgagagactcaaaacctcacccagagaaagcagaggccaggggaggtcaggtcagtgtgggaggcagggacattccctttcaaagggcggagataaggaggctgagtcaccgtcctaccttccaggggcgtggagacgcagcccacctcataaaacccagcattcccctcacagcagatcacctaggaaggaggcaggaaggaagggctggggggccaagttgggactgaaaaactccctttgggcagggagggcagcccatgaagagctttgcagggaagaggaaagggcaggtttctgttttctccaaggggaatggaagcttctcattccacagggtccataagaggagaagcaaagggattacaaatactcctcagaggctgacctgctcgaccacccagccatgtcttttccttggaagattaccagctggatctctttcaggaaggggactatggagatgtttttcctttctcgttttcgggtctgttatcttctgtgaccattgctattgtgtggtatgctgattgctctccctatccctctctgagctccagtcttatggtcagataaactgtaatgccatggcgccccaagctgaaacccacgaatggtgggatttgcatgaactctcataacagatgggcagagccaggactagaacccagctccctagactcctggcttagcgctctttccacggctgcttcatggaggtaggagactttgaggccaggctgcctgggtccaaataccagctctaccacttactgtgaggtccaggaaaggttttctgtgccccagtttcatctcctgtaaaatgggctaatataagcagtacctatctcacgggattcttttgagaattaaatatatatgcttcatatatatatgagaattaaatatatataagtgtgaagtgctgtcaaagtggtaactattaatattagtttctcgtccttgaacgtctctcctacttcatctgtttctctatcacagggtttcactacatcacaaggtctttagcgtggagctaggacatgagattatccccagtagtggttccttcagggaggtgctatagcattggggtccccagacctctactgccttcctcacactcaccccacctctgggctctctgctccctcttaccagcttctgtccctggggctcagctgtcccccgccggtccacaaacatggtgtcaatctcattgccatcacaggccagcagctttgcccggcgcccattacactgagtacggaagacgcaatggccaagatgcaagggtcaggaggccacatcacaggggtggggcggggtgggtgggggtgagaggggagggctttaggggatgtgcgggcagggaagcctcacctcttccaccagtcgggcctggccctgcagcagcacaggcatgagggccttctgcagcaggtacacagagcctggatacagcatccggcgccctagggtgtgcgccaccaggtagctgtggggaacacaggttaacaaaccccaaccctgttgaggcctggggactgtgctggggaccatcccagccctagcactcacagactgtaaggcctgctttacccctgaccttcacagctttactttcctctttcaagccttaatgaaatatgtaccaggctagtgttttgcaaacttttcttactgcaacctttgtaagataaacattttatattgtggctcagtgcacacatatcctgtatgtacagaattctgagagttttatgatgtaactgtctatacataataagtaaatgcaaagttatcatcagattatgattctgttaaaatataagtacaacatattaaaggtccccaaataaataatgctttaaaaaatgatggttataattcaaaacctcaaatatggcttgcctccctgactaattagcacactgtcaacaaccaaccactaagtccaccctgttccttggtattctagaagctgcctcctaactcccagcaaaagaaaattcccagtgtctgttccactataagatataggtggttatttccgttccttctgacatcatcagtacccacgactgagctttatttgggatttaccatgtgctctcaagcacccaggcaaggcaggagcccttcagaacatgttaccttacttaatctcctcagcaaccttgcagggcaggttcatcacaggtgcagacactgaggcacacaggggcccggagccaaggtggaataacaacagggcagaggggccacgatgggtacacagatgctaccagagcctgccctagctacaagtgtgtgtcctccccacccccaccccacccccactgctccttttcagcctcactgaaggagcttttgttcatatcccagttctttacttactacatttgagactccagacctctctgagcctcttttcttcaaacataaatatggataaaaatgactttgccataaatgatctacacaaaccatacagcactaggcccaatgagtgacagctattttacaatggagcgcccactcccagagcactcctgaaatggcccctccaccccagtgggcctctcctcgctgctgtttcccacctggtgatctgacaaggcagcttcttaacccggttgaggagggtgtctgctgtcccccggtgcaggggctctgggcgaagcagggccacaccccggcgggaagggccccctcgagactccttcctgaggaagggaaagatgcagggaaggatagggtcaggagcagcaagctggatgtctgaggtctggagaacagtggggtctaggaacgacataatggcattggaaggcaggcactgtgacctgagagggcatggaggtgggagggcagagcagagattttctggaatggttctaaggggagagatacagcaaaagaactggggcctcaccggctgctgggttcttcccagtggaagtcgactggccagctccggaagtcaaagttgtagttggcaagctgcctctgcagtgggcacgagaggcaaaggggtactgagaactcaggggaggctctcctacccaccctcaacaacaccttcgttatccaggggtctgatccccacacatcatggggaaaccaagcggaggtcaataccctcccaattctcagatggaaaattctaacaggaccagaaaatcaggggagatggtatgccccatcaggtatcaggactggcctgtctgccctcttccaagctaagaacctaacactctgcttttctaaaaaactaagtctgacccatccccaggaggagtggctgaaggtgctagtgcttttgagtgacgggtagtaggggtcgctggctggtcacggtctattccccacctgggtcccttatagggtgctgtcttagaagcttagaaatctcccagcagatcacactgacagacccaaggttgagtgagacagagaggagggaagtcacgcccacagtgggctcctctgccatgtggggccacccgttgaaggaagctctgacttccatcctcacaactacatcccttcctcaactcctgcagccatggatcagtgttgccctacagcccatccgaacctcgggccaccccactgagccagtccacatgcctttttttttttttttgaggcagggtctcgtgctgttgcccaggctggaatgcagttggtgcaatcatagctcactgcagcctcaaactcccaggcccaagtgatcctcctaccttagcctctggagtagctgggactacagacatgtgctaccatgcccagctaatttttaaaattttctttagagacaaggtcttactatgttgcccaggctggtctccaactcctgggctgaagcgatcctcctgccttggcttccgaaagtgctgggattataggcatgaaccacctcaccagctccacgttttttgacggcagtgggagctgtgtctttttttttttttttttttttgagatggagtctcactctgtcgcccaggctggagtgcagtggcacgatctcggatcactgcaagctctgcctcccggcttcacgccattctcccgcctcagcctccaagtagctgggactacaggtgcctgccaccaccatgcccggctaatttttgtacctttagcagagatggggtttcaccatgttagccaggatggtcttgatctcctgacctcgtgatccacccgcctcggccttccaaagtgctgggattacaggtgtgagccaccgcgcccggcctagctgtgtcttaatacttgactatattcgtcccccaccccctgagctcctagcactctattttgagggtttttattttctgcacagaaattttttgacatttcaaaaataatttgactaacagagagcaatagaaaaattatacaaaaaggtaaatggcaaaacaaaacaagatgactaaaagcaaatttcaggcaggctttgctcagacctgctctcaaatctggacttagccactttcttgctctatgactccgaatgggtcacttaacctctttttgcctctgttttctcacatttacaaataaaggtaataatgccacctcactcagctgttgtgaggatcagaaagggtgtgtgccaaatgcttcagccagtagcatagtacagggcatcattacgcagctccatagtgtggagtagccaggaatgtgatgatggtggtcatagctgtttgatcctagaaacctcccataacagaaaagagctctatggggccccaaagcccatcctcaaagataatcacagtccagcaccagccggcttggcataattcccaagacactgagccctagcttttctccctcctggcaccatgctgtactcccaggcataggagtggacacacctgtccaccttgtcccatccacaaacaaggatagcatggtattcaatgcatacaacaaaattaaacatttatagaactgagctgctgtgatacagagaaaactaccttctaagaaacattgtgggctgggtgcagtggctcacacctgtaatcccagcactttgggaggccaaggcaggtggatcacctgaggtcaggagtttgagaccagcctgaccaacacagctaaaccccatctctactaaaaatacaatattagctgggcgtggtggcgcatgcctgtaatcccagctacttgggaggctgaggcaggagaatcgcttgaacccaggaggcggaggttgcagtgagctggaatcatgccattgcacgccagcctgggcaacaagagcgaaactccatctcaaaagaaaaaaaaagaaacactgtgggccaggcacagtggctcacacctataatcccagcactttggaaggccaaggcaggcagatcgtctgcagtcaggagttcaagactagcctggccaacatgatgaaaccctgtctctgctaaaaatacaaaaattggccaggcacggtggctcacgcctgtaatcccagcactttgggaggccgaggcaggcggatcacaaggtcaggagatcaagaccatcctggctaacatggtgaaaccccgtctctactaaaaataaaaaaattagccgggcgtggtggcaggcgcctgtagtcccagctactcagggggctgaggcaggacaatggcatgaacccgggaggccgagcttgcagtaagctgagatggcgccactgcactccagcctgggcgacagagtgagactccgtctcaaaaaaaaaaaaaaaaaattaactgggcgtggtggtgtgcacctgtaattccagctactcaggaggctgaggcatgagcattgtttgaacccgggagttggaggttgtagtaaactgagattgtaccactatactccagcctgagtaagagtgagactctgtctcaaagaagaaaaaaaaaaaaagaggccaggagtggtggctcacgcctgtaatcccagcactttgggaggctggggcaggcagatcgcctgaggtcatgagttggagaccagcctagccaacatggtgaaaccccgtctctacaaaaaatacaaaaattagagggtgtgggtggtgcgtgcctgtaatcctagctactcaggaagctgagacaggagaatcacttgaacctgggaggtggagagtgcagtgagccgagatcgtgccattgcactccagcctgggcaacaagagcgaaactccatctcaaaaaaaaaaaaagaaaaagaaaaaagaaacattgtggaatgtttctagtttagccagttcttacaggtgagggagggggaagattgttctagcagaatattccattagaagtggtagggaggaaaaattcctcaggtggacagttcactaatggaggtgagaagggatacagcaatgtgcaagcaaacacccagtgtggtgggtggtaaaacacacctcctcttcctgcagaagccagtgtctggtgctctgagggacaactgagaaagctgctattgggtgcctgtgtggcacttttcctagggcctctcaccttgttttctgaagactggttccgatgtgttgcttccaagatggtgatgaactgccggtactgggggttggtccagcggccaatgcctggtagaaaaaggacaggaaacagtgctaggaaaactgggaagcagaaagcctaggttttaggaaaagaattggagatgggctagaagaaggccctgtaagaaaaagtgaaagaaaaaggaactgagggcataggatgcggagaaatagatgtgagccaacccccttcctccaaatccagcaactggctacaggacgcttcttctccctagcttctgcagtttgtgtctttatagacaatccttaacctaccatcttccagaatgttcctcttcctcagtctttaaacactgtcatataacctattaaatgacactattaaacactatcatataatactattctcccttgcgaatatcaaatttctctatttttcactgccattcttctccaatgtttgctttctgcctcttttctgtatattctagccccttgccatctggcttcagagtctccgactcctgcccataattacttcctcactgaattcctgactcttctatcctcattctcttcaactgtactactcagcattctccctgtccctcaagattcttcctgcctctgcttcctgggcccatccttgactccttccagttcctgaacagttcctctcctgcctcctttctgctttcctttctgaagcagaagcaactctcagtgctgactctctctcctctctcttttcacttacacagtcagtgattgcatccactctcctttcactgctgagccacctcaaaccctaacttctctcctcactgacttggcaggtgtcgtgtgtcagacaggcaccgtactacacacgggagactcagcaggaaatgagatacacagctcctggctctcagagagctggcattctggttggggttaggtacagccaggagaagacaataaacaacatttcagagagggataagtgctacagagaaaatacaacaagaatgaaccagaactttatgtgtcatcaatggtattcccccaaaacgatatgatgagagaatgatgtgtgctgcagaatgatttgtacaacatttatgccaaaaatgtaaaatgtgcaaaataatacatactgcttatagataccatatttcatagattctaaaatgtatattttttaacccttgaaaactctgaaattagaattcattttacaattgatggcagcttagacttgaggaactgaggtatatgtttcataaaagtatgtgccagaaaaaaaaaaaacccacaccaaatgacaattattacttctgaggaaagaggaagatgggactgaaaggattccaatgggaactccaaccctaactgtggtgctttagtattttgttgacagaaagcatttaaagcaaatatcacaaaactatatataaaaaaaaaatcacaaaactatacatcaaaaaatttaaaaaggcttttatattttgttctctggacttttctgtattttttcttttttcttttttttgagacagttttgctcttgttgcccaggcgggagtgcaatgatgtgctctcggctcactgcaacctccgcctcccgggttcaagtgattctcctgccacagcctcccaaatagctgggattacaagcgcccgccaccatgcacagctaattttttctgtattttttctaaattaaaaataaataaaataaaaaactaagacaaaactgagcagtgggagctacttttagacagggtggtcagggaaggcctctctgaggagagagcccagccctgcagagatcagggggcagaacacctcaggcagaaggtcctggacccaactgcgaccatccagccctgaccccaccacccccatgttgaagcatcgcccatcacctggttgtcatcttatgtacccactaggggtaggtgatctgtcctctttatttttttaaattgcgagatacaacatatgtacataaaacatatattcagtttaaaaaatacaaagcaaacattcatgtgactatcacctaggtcaacaaagagaacacagccacctctcagcagggctctcccccactctgttctcccccaccccaggtaatcactctcctaacttttgagaaaaccatgcccttgctgggcgcggtggctcaagcctgtaatctcagcactttgggaggccgaggcgggtggatcacgaggtcaggagattgagaccatcctggctaacacggtgaaaccccatctctactaaaaaatacaaaaaaacctagccgggtgtggtggtgggcgcctgtagtcccagctactcgggaggctgaagcaggagaatggcgtgaacccgggaggcggagcttgcagtgagccgagatcgcgccactgcactccagcctgggggacagagcgagactccgtctcaaaaaaaaaaaaaaaaaaaaagaaaaccatgcccttgttgtcttcggtgttctacctcaaacatgcacatcccttttgaattttatataaatgaaaacatactgcatacattattttgtggttagcttcttctatttaacacaacatttgagaaattcatctgcattgcttttgtttatctggagacagagtctcgctctgtcacccagactggagtgcagtggtgctatcttggctcactgcaacctctgcctcccaggttcaagcagttctcatgccttagcctcccaagcagttaagactataggcatgtgccaccatgcccagttaattttttgtattttattttttctgagatggagccttgctctgttgcccaggatgcagtacagtagcgcaatcttggctcactgcaacctctgcctcttggattcaagcaattctactgcctcagcctcccgaatagctgggattacaggtgctcaccaccatacctggctaatttttttttgtatgtttagtagagacggggtttcaccatgttggacagactggtcttgaactcctgacctctggtgatctgcctgcttcagcctaccaaactgctaggattacaggcatgagccactgcacctggcttcatctgcgttgttgagcgtagctacagtttgttcatttgcattgctatatagtgttctcttgcatggctattgcatggaacttttttttttttttgagacggagtcttgctctgttgcccaggatggagtgcagtagcgcaatctcgtctcactgcaacctttgcctcccaggttcaagctattctcctgcctcagcctcctaagtagctgggattacaggcacgtgccaccatgcccagctaatttttgtatttttggtagagacggggttttaccatgttggtcaggctggtctcaaattcctgacctcgtgatccactggcctctgcctcccaaagtgctgggattacaggcatgagccaccacacccggccacacagaacatattttatccatcctactatttgtagccactggagttgtttccagcttaggattattacaaacaatgttgtatgctgtattcttgtacatctatattgtttatacatgtgcaggagttttcctagtatgtatacatatatagaattgttgtagggtatatgcatcttttctagataaaagcagccaggcatagtggctcacatctataatcccagtacttcgggaggctgaggtgggaggatcactttgagttcaggagtttgagaccagcctggacaacatggtgagaccctatctcttaaaaaaaaaaaagcaaacctttttgttacttttcagttattttttcatatttataacccaagtcttttaaggaaaagatcatgccttaaaccattctcaatgattccctctcggaggcccatcactaaaatgtatttgcacaaggtacttaatttttaaccagtgacagtgacagataagattcaaaccaggtttcctctccacctacctcggaggcaggccacacctgccagaagtagcagcaatgtcccagcatagtgagaaaacggcaccactttggacaaactcaagtaacctgggaagggagagggacaatgtgagaccctctccgcaatgtccctcagctcctcttcccagttcagccccaacctccaccccacactccctgtttggaacagccataccctaagaggaagaagatgcctgatggaagagggaagccaagccatcttcacaggtcccctctcctctttagggagctggctcatctgccaacaacctgcccatttgctaccccaccacctttgaaaccacactgacctttcctgtacaagtagaagaaggcgaagggagaggagtaataagagatggaccagaatactgaagcctgcagcagagagacagggacaggcaatcaatacacacacacacacacacctgccattccaggcatatactatacactctgagcaagatggacaacctgagggatatcatatcatatttggtgtatgacaccatgaatacagtaggtgctcagtatttgttgaaaagtagtgtgtcaatgtaatggaggctgggaaaatttggtacaggctctattttcttcctctggaattatggaagaattatgtcttccatctccagacataattccatcacatttaaaggcagtctctctgtctactcaagttaatcaagccttttcaattggccctgctcaggacagcccctggcctggtccccaagagatgcgcaaacgtcaccacaggaactgtgccagaaagaacagctgtccctgcagccaaagaggttagttgccagggaggacaggtcactggggaactgcaggacttagcacctgcagatggtcccaagagtaaacatgttttccttacggctcaggttgcccccagagaaagcagtgctacataccaaaggggagtgccaagtatgcacatttagagtgtgcctgtgtgtctgtgttggagaggtctgctgcagagcccagggcatcccccaaccccagggcactgttgctcccaagttagggagggctaagttcaagaggacaggtgggtctgaaagatgcagagtcccagatgccagggtagacataccagtgccaggatgctgtcagcatgtttctccagggcacggggctgatagtacgtatcctgccaaaacagatggcctccttaaggaccctgcccactggcaggtcctttcccttccctttcagaagccctgctgtgtgtcctctggttctagtctcgttgactatctctcttgaaacatccctggcccccacagaaactcctcttcctcaccctcactctgaacctaatttcccacccctgaccatgggaacaaacacagggagctggatttggaagcaaaagtgaaagcagcattggacgatttttgctccttttccacagcctagtttcaaatggattgcaggcgcgtgcatgtggggagaagggttagtttgagaagaaagaaaagacacctagacaatctaagaaggaaagaaaagcatcagaaataagagtagttgactaagaagagaatgtgggtaggagcgggcagtttgtaggagacagtaacacaatgagacaactgataaaaaggaagagaatatttagaacagcctaccaccacccgccagctctccagaatacaatgactcgggtctccaggctaggttgggcgggggttgaggggaggaccgacggatacaggatctgtaaaagtcattctgaaattcaaggcgagggtaaagggaagataaaaacagagccgggggaggcatgaagaggcactgaagaagaggaaactgggagtctgacagcaaaattcaacggctccccagtccgcgcagggtctcttcccgggactcaagactcaactgggaccggcacgaaccacgacacacagggtcggggggacgcggagaggaaagaacaaagagtggcagtcggaatgagaaagcggtaaagagcgaaaaagaaaggaggcggccagtccgtaggcgtgactttaactcaggaagcacacagagcgcagattttgcggataactggcttgacaagcaggctccccttatttcccattatgggcacttctggggagcaaaaggccgtaaagggtttggactgtaccacgttcttcggtggggaggaactcgactcacccaggagctggaatggggggcagtgactgccgttggcgtctcagggacgctggccggggccctttcagagtccctctcccggtagattttgtagagccgggggcctaggacgcagctcagcagcttcgccatggccccggctcgggccgctgctcttccagcagcaggtccccctgccggccccgccctccctgcctctgaggtgttgtgtgcccttgacgtcagcccgtaccggctccgcctccgggcgagttgcgacattttcagtgcttcctgagaagagtttcgcgcagttggagctacgggtacagcagtggtccgaaactagtggaagaccactagaacgcggagaatcagaaaattaccgggcatggttcaataatttttttctgtctcattattggcagactctagagcgacagcggaaacgaggggtgagattaggagtacttgataagagtaaccgaaaacataaggtgtctaggaatgtatctagtacaagaaatgcaaggttttatgaagaaaactataaaaagttattgaaaaggcaaactggcccggcccggcgcagtggctcacgcctgtagtcctagcactttgggaggccgaggcggggggatcacttgaggccaggagttcgagaccagcctggccaacatggtgaaaccccatctctactaaaaatacaaaaattagcctggcatgggtggtgcgcgcctgtaatcccagctactcgggaggccgagacgcgagaatcgcttgaacgcgggaggcagaggttgcagtgagccgagatcttcccactgcacttcagccttggtgacagagcaagactctgtctctaaataaataaataaaggtaaactggcccagcgcggtggctcacgcctgtaattccaacactttgggtggccgagggatgattgcttgcgtccaggagttccaggccatggctcatgcctgtaattccaacacttggggtggctgagagaggattgcttgcgccctggagttccaagccagcccaggcaacatagtgagaccccatctctacacaaaataccaagggggaaaaaaaaaagacctagcagggtgtggtggtgcccacctgtagtcccagctacttgggaggccaaggtgggagggtcgcttgagcccgggagtttgagatcgctccatgcactccagcctgggtgacagagccagaccctgcctcaaaataataacaataataattgaaaaaataaaaaaagaaagaggtaaacgaaaagcttttcaataaatggaaagctacaccatggtcctggatacgaaaattcagcacagtaagatatgcggaatatttgtaaaaagaaaataaatgaatcattactgttatgcatgaactggatcttaaaaccatgatgctgagtgaaaatagaaagccacagaagaatgtatacgtgatactagtatattagattcaaaaacacataaaatttaatgataaagcaagtggagaagaaagagaaaattcagaattgtggttacacagcatagaggatctctgactgaaacggaatattctttttttctgtttttttttttttttttttttgagacagggtctagctctttcacccaggctggagcacagtggcacaatcacggctcactgccctgatcctccacctgctgggctcaaccatctttctgcctcaacctcctgagtagctgggactataggcccacaccaccatactcggctaattttacaaggtctcaccatgttgcccaggctggtctcgaactcctgggctcaagtgaacctcctgctttggcctcacagagtgctgggattacaggcatgagccactgtgcctggcctggaatattctatttctttttcttttttttttttcgagaccgagtttcgctcttattgcccaggctggagtgcaatggcccgatctcggctcaccacaacctctgcctctggggttcaagcgattctcctgcctcagcctcccaagtagctgagattacaggcatgtaccaccatgccctgctaatttttttatttttagtagagatggggtttctccatgttggtcaggctggtcttgaactcctgacctcaggtgatccgcctgtctcatcctcccaaagtggtgggattacaggcatgagcaaccgagtccggcctggaatattctatttatttatttatttatttatttattatttatttatttttttgagacggagtctcgctctgtcaccaggctggagtatagtggcatgatctctgctcaccgcagcctctgcctcctgagttcaagcgattctcctgcctcagcctcctgagtagctgggactacaggcatccaccaccacactcagctaatttttgtatttttagtagagacagggtttcaccatgttggccaggatagtctcgatctcttgacctcgtgatccgcctgcctcagcctcccaaagtgctgggattacaggcgtgagccacggcgtctggcctttattttcagagttggggtcttgctctgttgcccaacctcaaacttctggcttcaatcaaccctcccaccttggcctccaaaagtgttaggattgtagacatgagccaccatgcctggccaggcttcttttactctcattatattgtgagattcaactttgttgcaaatcactaggtttgttcattctcattgctgtccagtcttctactctgttaagcatttatccattatatagttgtacttcatatagtttttggtatgtatggaatatttcatcaaaataattttaaaaataaataaattacacattaaaactgtaataactgcatgaagatctgccttaggagtttttgccgttcagaaggatgaatcagcccgttagccttgtccctgagtaataatttaatacacttattagggtttcaggagaggtccggggtatgccagacaaccacagggaaagtcattccaaatcatttacgggacactgactcgatacacagtcttgtgctgggttctgtggaggaccaacataaaaactcaaactcagtttcttcactcatagctgacatttcttttcttttcttttctttttctttttttttttttttttttttttttttgagatgaagtctcgctctgtctcccaggctggagtgcagtagcacgatctcggctcactgcaacctccacctcccgggttcaagcgattctggtgcctctcagcttcctaagtagctgggattacaggcacatgtcaccacgcctggctaatttttgtattttttgtagagacagggtttcgccatgttggccacgctggtctcgaactcctgacctcaagtgatccacccaactcatggctgacctttcttaggagtgaaagagacctcagaatgtacttccagactgacaagagctagacaggcaggaccacttctctgcatggttttttgcatggaaagtctttatttgagccccttagctgatgtggaatcagaagagcaaaaaggtcatcttcagagtggcctgggctgggtccttttctctccaggatagaaaagtggtggtcactttatccctagtagacatgctgctgggctttatcgccccagcattcccatcccctccagagccccttgtcactccagaccagcgagtgtgggcctttatctggactctgcttcctccctggggacaccaggtcttggagcaagagaacttggcaggctctccccatggcagtcttattcctcctcctgttcctatgtggaactccccaggctgcaggtaaggggcaagaggtacgggattccttagctatttgcaaggttggggagggactactgctctttctcctaggagcctggcgaaggcatctgactcaagaagatagaattaccccaaccaacctcctcctgcctctgacactagggaagacccagaggcaacgagggtccaggttatgcagtttcctttataaaataagaagaatgagtaaatgcttccagaaaagtagaaatgagtagaagagatgtgggcatttgccaactttcagccttttccctcttgccctcagaccccctcactggctgggggagagaggaggaaagcccttaccctcttctctccacctgtcttatttttgtagctgtcacttgagaaatgtggtcaccagccaggcctgtgctgggggaccccagaagggaaggaagccagggttgaagatcaaatggggggttattgatctgatggaggtctctggcctcatacaaccctcttcccacagacaacatgcaggccatctatgtggccttgggggaggcagtagagctgccatgtccctcaccacctactctacatggggacgaacacctgtcatggttctgcagccctgcagcaggctccttcaccaccctggtagcccaagtccaagtgggcaggccagccccagaccctggaaaaccaggaagggaatccaggctcagactgctggggaactattctttgtggttggagggatccaaagaggaagatgccgggcggtactggtgcgctgtgctaggtcagcaccacaactaccagaactggagggtgtacgacgtcttggtgctcaaaggtgagtgggggcatgcagaccaggggctactgtggcccaggaagtccaggtgaagaactgaggaatccctctctcccctacaggatcccagttatctgcaagggctgcagatggatccccctgcaatgtcctcctgtgctctgtggtccccagcagacgcatggactctgtgacctggcaggaagggaagggtcccgtgaggggccgtgttcagtccttctggggcagtgaggctgccctgctcttggtgtgtcctggggaggggctttctgagcccaggagccgaagaccaagaatcatccgctgcctcatgactcacaacaaaggggtcagctttagcctggcaggtaaactgaggaaggagacggaaagggatgttctttcacttcagcctcccaagtagctggaattacaggcgcccgccaccatgcctggataattttttgtacttttagtagagacgagatttcaccattttggccaggctggtatcaacctcctgacttctagtgatctgcctgcctcagtctcccaaagtgctgggattataggcatgagccaccgcacctttaaattttttgtagagacaggatcttgctatgttgcccagtctggtctcaaactactggcctcaaatgatcctcctatcttggtctcccaaagtgctggggttacaggcatgagccatcacatctggctattttttcttgaaagaaagggtgaattactataaagggtgtgaggggaaagtgtggttatggctggtggtctgctctgtagttggttgcccatgcgtgagcagggggcattgccattctctactttttattttattttattttattttattattattaggccaggcatggtagctcaatcctgtaatcccagcactttgggaggccgaagcaggcggatcacttgaggttgggagttcaagaccagcctgactaacatggagaaattctgtctctactaaaaatacaaaattagccgggtatggtggcacatgcctctaaccccagctactcgggaggctgaggcaggagaatcacttgaacctgggaggtggagggcgcagtgagccaagatcacgccattgcactccagcctgggcaacaagagcgaagctctatctcaaaaaaaaaattgtatttttagtagagacggggtttcaccatgttggccaggatggccttgatctcttgacctcatgatctgcctgcctcagtctcccaaagtgttaggattataggtgtgagccaccacgcctggccttttttttttttttttttttttttttgggatggagacttgttctgttggccaggctggaatgcagtggcacgatcttggctcactgcaacctctgcctcttgggttcaagctattctcccatctcagcctcctgagtagctggactacaggtgcctgccaccacgcctggctaacttttgtgtgtgtgtgtgtgtttttttttgttttttttttgagacagagtctctctctgtcgccaggctggagtgcagtggcgcaatcccggctcactgcaacctctgactccctggttcaagtgattctcctgcctcagcctctcgagtagctaggattacaggcatatgccaccacgtccagctaatttttgtatttttagtggagccggggtttcaccatgttggccaggatagtctcaatctcctgacctcgtgatctgcccgccttggtctcccaaagtgctgggattacaggtgtgagccacagcgcccggcctcttttttgtgtttttagtagagatggggtttcaccatgttggtcaggctggtctcgacctcctgacctcaggtgatccacccacctcggcctcccaaagtgctgggattacaggtgtgaaccactgcgcctggcctcaatttttatactttcagtagagatgaggtttcatcatgttgaccaggctggtcttgaactcctgacctcaagtggtctgctcgccttggcctcctaatgtgctggaattacaggcatgagccactgtgcctggccgccattctctatgggtcagggtgagaggcctggaaaggggcagagtagggtggaggatattgtgggcagggaagcttacaaagtcttctgttggaagagcccaccagactgtggaggggaagcctctctttggggcacagggacagggcccctcactacctccctcccatccctctggtctggcccttactacagcctccatcgatgcttctcctgccctctgtgccccttccacgggctgggacatgccttggattctgatgctgctgctcacaatgggccagggagttgtcatcctggccctcagcatcgtgctctggaggcagagggtccgtggggctccaggcagaggtgagtccctccctccccggggaaagaagagggcacatgggtgggaggcaaagggctaggctcacaccccgcctctgtaccccacctcctctaggggagggggcgaggaacacggctctaagttgtctgctgacttctcttctgtatccctgatggctccttctccccagatgcctcgattcctcagttcaaacccgaaatccaggtctatgagaacatccatttggcccgtcttgggtgaggaacagctagggaacagaggcttaaatcctggaggggactggggatggagaggaaacacgggttgggttggggatgggccctcgttcctgaggatgtgaaaagtagaggtatccttaatctgtctctctggaaaaccccacagcccacctgcccacaagcccaggtgattttggtgacatctgctgggaagtgtgacctgctgtctcgctggccatctggcacctggaagattcctcgacaaccttagcaaggggggcgggactgagagttcgacttcaccatccagctggcctccagcagccaccaagctgtgtatggggaggggtgggggactgaaggaaaggaggagcattattctgtgatgtaacctacaaaaaggtttggtctcctgtcttgtagcagcagtggagggatggccctgagcccatagtactgtggggttgaggggagcctgaggttgctggtgggggcaaggaggatgggtgtgcacagggaggagacaggaatctggagacttgagcaatggtgaggaatccattgcagtggagctgaaggacaaatggggaaaacgggggaagagagagaagggaagagactcaagtcagagaaagtggaaagagatggacagagggagaaaaatagaagcacaaagtgggaggatggagggacagagaaaatggaaagcctcaacccatctctaaattaagccagacccccactaccccatgtctcatcctcacaaagaagagagggaacaggcatatttaatcaaccccagacttcctcacatgcaaggggagggaactgagtcaggatagagatgcctgtgctcagctcccacccggggccccctccttatccttccttatcctaggcacacactcttccctgtggcgccttaccggggcattcagagcatgtgagcagctatcgccactctggcacttccttcctgctgccctgaggtcacaccctatttctcgggggcagagggagtgtctactcaggctggcaggcccagtgggggtatgttatttattgggccggggccatgctgggatgtctgtgaaccatgggcgagtctgggctggtgaagcgagggaggatattgatgctcccaacttggccattccctagtctcaggcagaaatgagctgagctccagccacaccctcacaagcagctccactgggtgcccttttgtgtctctgctcaagcttgggccttactggaaaaaagctttctcagaagtctcacctaaaggcttcaggctgcaggggcttaaactaagccattggcaagaaaaaggacgaaaatgacacagatggagaatgaggggagtgccgtggtccaggttccagctccagcccaacccaccaagcagctacagtttgctcttagagcacacacacacagacacacacacacacacacacacacacacacacacacactgcagtatctgcagtattactggactcctagatagaccttttattaaaggtactcttcatagtcccccaagccctccatcctgagttcccgacctaccacattagtctttcctagcaagactctcctccttaccatacctgatgctcctttgatccccttgcctgagatccacagtgtcatcaaaatgcctgccttgccagtgacctgggctgacacggggcatcagcaatgggcatctagaaaagacaaaagacgcagaataggtgttctttatgaggttggactctgggcaggtgcctccccaggccttgtgaggggtctgtgaggggtctgctgagagatctggggtctctgtacaaaattaggttctcgggcatgtctcaaagtgtctgtgcaggtgtttccagggccgcagtgatggcggggggtatcctgggttgggggctgcagatccacggaagctagtggaggaggtgtcctctcccagcgaagctggccacaaagaggggcagggaggcgaggaggctggtgagctgctgtggggaagcggctatgttgcacaggtcctgctcgcagcagtggtgccacagagtgtaggagtgcagccagtaggtggcatagcctggcagagggcactgggcccttgagaggcagctttttcactcagtgatctcactctggtctgtgggatgaaagaggcatgctgaggcgggggccacaggaaaggccggatggatggaggtagggagcctcctggagaagggccattggaccagagtcctacctgaagtgccaatactgatgccacaagcttcatcgtcccgacactcggtgggaacagggtggcagggtttggtgaagccacagatgtagcagcggagccttccccgggcaggggacatggtgagacctgttgaggcagcagagattaggagagcaggagaggcaaaccctccctgtggggcaggcagaggccagatccggagagggatcacagagagaggtgacacatgaagcagagagaggaaagctgtggaataagggaggaaagctgacagaagtagaaaaaatagctgggcgcagtggctcacgcctgtaatcccagcacgttgggaggccgaggcgggctgatcatgaggtcagaagattgagaccatcctggctaacacagtgaaaccccgtctctactaaaaatacaaaaaattagccgggcatggtggcacatgcctctagtcccagctacttgggaggctgaggcaggagaatctcttgaatctgggtggctgaggttgcagtgagccgagatcatgccactgcactccagcctgggtgacagaacgagactctgtctcaaaaaaaaagagggagacgatgcaggaaaagaaacagagatggaggcaagaggggtacagggattgagagatgcgcagacatgaacagaagccacaagaatcagagaccaacataaaaagagtgagacaaaaagccagacccagcagcagggaagttgagggggtcagtgaaaaagttaagtaaatggcaccagagacagataggaaaatagaaattgacattgaccaaagggcccagcacagaagcaacacgtgaaataagggataggggagacaggggcggatcaaagatgcagcaagggggagacagttattctcaaatgccttgaaaggaaactcttcctttcccacctcatcaggctggccttcccagtggctggtctccctgaagtcccccactcccccagctctcttcttggcctcttccagcacccacacccctctcctccccagccctcaggttcctccacatgcccttgtccccacccccagccccctgaccactgaaggttccccagcccacccttacccagtgccccacagaggaacagcacgcagaggaagatgctggaggtgcccatggccagacacaggctcaggaatctgggagaggtgatctgcaccccgagatcccgggatttgtagagttggagcatttgagcaagacagtgaggaaccagtaaacaaacacacctagggagtgaatctggggggcggaaccatgaccagattcaccagcctgacccagcaggcagcgggggcccccagcctgcccctgcaaggagtctgcccttgcctggagggtctcctctgctctctcagcatgttgtctctgtaacttagcttcctctcctgctcctgagttgtgtctgtcgccttccctcctactcctccccctccctccccatgtctcaagctgctccctggctctctcagcttctctctgtctttgttttctctgtctttccccctcagtgctttcatgtctctcaaagtcaccctcctaaacagccccggcgtggatctgtttgagtgtagaatcaacaatacccccacccacacacccacatgcacacacaaagcccagctgtgtaagggcggaccccacccagcttcagatccctttgatccccccaagcttcaacattcctaccctgtaattatccctgccagctttactaccttggaggaaagaaataaccacgggtggggctggagggcctgctgatgtgcttgcactggggagaaatcactagaaaggaaggcatggatgggatttggggtaggggggtggtgatacagcctggaaggctggggttgaagagactgggaaggaggaaggcccatctggggaatcagagccagcatgtaccaggaggagtaagactaggaacagggagtgaagataggggagacacaggtgcccaggagagcagctcttttcaaaaatattgatctcaggacctctttacacttttcaaagttacttaagactctgaagagcttttctttatgaggttatatcaatatttactacattaaaaattaaaacagaaaatttaaagtaggtatttattgatttatttaaacaataaaaataataaagtattacatgctaacaaaatacagttttgtgaaaaataactattatttctccacagcacagtgagaagctgagcattgctttacatttttgtgaatctagtgtcaggcttcgtgggagatgcctgggttttcctatctgcttctgcattcagtctgttgggatatgttgttttcgttgaagtccagtatatgaagaaaatctgaccttacacagatagttgcaaaaggaggaccctcaaggaccctgtgaaagggtatcagggatcctcaggggttcttgttggtccacagactgctgctgaggataaaggagtttgaggactccagaggatgctgagagcatgctgtggggcccctccctgtccccactggggcccttggtgcctgctgggggagactctttcttccttttttatagccctataaagctcaaggcacgggggatataaggcaggcagagccgggctggggaggggggtgggcaggaggtagaggcggtcctgacacgggcagactgcgatgaaaccccagtttgttgggatcttgctcagctccctgctaggggctgccttgggtaaggaggcggccagctagcttctcacacaggccttctgccagccggctccaccgagggcccaggtccagcgcctcttttctcctgccaggaaaccgaatgcggtgctacaactgtggtggaagccccagcagttcttgcaaagaggccgtgaccacctgtggcgagggcagaccccagccaggcctggaacagatcaagctacctggaaaccgtgagtcctcagtttctccctcttccagcagcctttccctgcctccagccccatgtcaatccttctggcttccagaaccctccaggctcagtctggctctgggcagatggtgcagctgttagaggagagcagtctgtaccccttctggctcctggcacggagcccctgagaggcccacagtccttgtgcccccacttccccacctccttattctcctaaaagaatctcataggcccattagctcacaaatgaagagctctggccctgaaaggccaaagttaaaaccaaacttcaaattttcggcattagttaaggaccagggaggggtgtgtgtgtgtgtgtgtgtgtgtgtgtgtgtgtgtgtgtacatgtttttaatattttattttaacataattttggattgacagaaaagttgcagaaatactcaacttctcctaatgctaacatcttacataaccatagcacaattatcaaaatcacaaaataactgatacaatactactaactaatctacagactttatttgatttagcaagatcctacattgcatttagctctcatgtcttcttagtctcctctgatctgtgccagttctgtttttctttgtctttcatgaccctgacacatttgaagagccctgataaattattttatacctggagtttaaaaaattacttttagggccagtgcagtcactcgcacctgtaatcccagcactttaggaggccaaggtgggaggaccacttgagcccaagagttgagaccagcctgggcaacatagggagaccctgtctctacaaaaaacaaacaaacaaacaaacaaacagattaaaaaattagttgggtgtggtggcacatgcttgtagtcctagctactcagggggctgaagagggaggatcgcttgagcctgggagattgaagctacaatgagccatgatcacgccactacactccagcctggggaacaaaatgagaccctgtctcaaaaataataataataataatttttaggctaggcttggtggcacacacttgtaatcccagcactttgggaggccaaggctgaagagtcacctgaggtcaggagtttgacaccagcctgggcagcaaagtgagacccccatctctacaaaaaatgtttttaaaaaattagccaggcatagtggcacacacctgtaatctcagtttcctgagaggctgaggcaggaggattacttgagcccaggagtttgaggctatagggaggtatgattgcaccaccacactccagcctgagtgagagagcaagatcttttctctaaaattaaataaaatcatttttagattaaacaaaaattacgtgccggatgcagtggctcacgcctgtaatcccagcactttgggaggccaaggcgggtggataacctgaggtcgggagttcaagaccagcctgatcaatgtggagaaatctcgtctctactaaaaatacaaaattagccgggtgtagtggtgcccgcctgtaataccagctactcgggaacctgaggcaggagaattgcttgaacccaagaggtggaggtcgcggtgagccgagatcacaccattgcactccagctgggcaataagagtgaaactccgtctcaaaaaaaaaaaaaaaattacagatacttgaaatactaaaaattattttatagaatgtccctcgatatttatttatctgatatttgccatgatgagattgaggtcatgcattttaagcaagaatactgcagaagtgatgttgcatccttcttgctgcatcacatcaggagtttacaaggtcaatgcattaactttgatcacttggtttcagggaggtgttttttgagggggctgaaaatccctttgggctccttgaaatcacatctgctctgccccagaaggcaagtcctgaagccaggagtccaacaccccagtttcattctctctctcagccccagtgaccttgattcaccaacatccagcctgcgtcgcagcccatcattgcaatcaagtggagacagagtcggtgggagacgtgacttatccagcccacagggactgctacctgggagacctgtgcaacagcgccgtggcaagccatgtggcccctgcaggcattttggctgcagcagctaccgccctgacctgtctcttgccaggactgtggagcggatagggggagtaggagtagagaagggaacaagggagcaagggaacaagggacatctgaacatctaatgtgagaagagaaacatccttctgtgagtcattaaaatctatgaaccactctacagctgactggaaaattacatctatctttggttgatgggagggctaaaagcgtaatatggggcatccaggttctagtttgggggttaccaagcaacagcgggcttaattacagtggtgcactccttaaccaactaaaccccaaagggcaatggcttatctgccttctgtggctcctggatcctgttgctgggttgaatcttccttagcaatgagattcattgagtggggttgccagggttttgtgagcctgagtctgggtttgctcccctatttcccatttgcaagttggctcccaataggactattttgaattgagaaaagaaatgtaaaaactgtgataggtaaaaactgcttgatgccctacttactaactaggctaggtgaggcctttgactctaacctgagagaaactgaagaaacagggtctcaggccccatctccatgtacctctcctatcctttctggagagccctcaagccaggccgcaccttcttcttggcaatacatcaggggtgtggcctaaatttaggatatgagttgttgtgtgccacctggagacactggaagggaggatgaagacctgaaaaacctgtttctccattttccccagcccagcctcccagggaacctccctgaaggattcctgtgtaagggagggagattgagagtattatttcctgggaggtgacctgacccttaggtcttcttataataaatgtacattttatcagactcagacatttattactcaaaatggaaagaggtgagtatgggggatggggtacatatgggagcctgggtttggggagtcagctctgtacagtgaggtcatcaggtccttgtgggagccttcactggggacaacacagaagccccatttcaggcccagatcccaatccctcctcaagtaggggacagcagagtataggaagcaaagtggggagcccttctaggagccaatggaggtcctggaaggaagtgggaagggacccagaaaaaggagagtgaagggtgtgaggtgggaaggatggatgaggagaccactcggaacagtgtttaattaaagaaatgggagctagggagagacgattctgtaaagccaggggatacagagacacagggagagaggctcaggccaaggcaggtgggaggaggggcagccaatggaatgagtctcagtgcagcagccagaggccaaggccagccaaggaggtaaggaagacaaggcccagggctggagtgggccggggtcctgcgctgttgcagttgtccttgttgcagcaggtggtgttatatgtcagacccagcttgcggttggtttggttgaaggcctcctgacagggctcttctggtgtgccacagcgcagattggagaaaacccacatcttacctaggggtgggaatgggcagggaatcggccaggatgggcacctggcatgcctgtgtccacctccccaccccatccacccacctaggcttccttccttcccaactctgtccctggccctccccttctcttttcttagtctgatcttccttctgcacatccttacccaccactcccccagtcctggttctatcacttgctggccatggacctgttactgtctctgttttttgtttttttgttttttccaagacagagtctcactctcgcccaggctggagtgcagtggtgccatctcagctcactgcaacctccgcctcccaggttcaagcgattctcctgcctcagcctcccgagtagctgggattacaggcgcccactaccatgcctggctaatttttgtatatttagtagaaatggggtttcaccatgttggccaggctggtcttgaactcctgacctcaagtgatccaaccaccttggcctcccaaagtgctgggattacaggcatgagccaccatgcccggctgtgttactgtctctttttgaggccgttttctcagtataataatagcacccacatcacagggttgtcatgaacattaattgaaaaaaaggcatgcaaagacataggatgttgcctggcacacaaccatctttggccaaatattatcattgctataatcctctgcttctccatctcagtcttagacccatttgggcctcagtcctggtcatagaggctcccacctccctgttcaccccactaaggaaggggatgttaccaaggtatgcatgtgttgtcaggcattgctgtcctggctccaggcggcaggactgccggtccacacagcccagcacagggaccttgtagcaggagtgacagcgaatgtcagctgggaagacacaagtcaggctgaggtgatggggtctctgacttacctggggataagctgagctgggggcaggggtggagggtggagaagagcccatcccgtaggtgctccaacctgtttggctgtttggtctagcaagcacagagcaggtgagtgatgcagggaaaatggaaagtgggcggcaggtaagggtagagctgttgctttgtgaaaggcccacgccctacatatcttccatcactccaccccgtttggaggtgagtcaagagggacagaactatgaagaaaaacatggggctggagatagatggaatgtgaggaagataccatggggaaagaatgtggatggtgaaggaggagatggaaacttgaaagaaggagaaataataaaaatgaaaatcatgagggttacaacactgtcagaaatgccttggaacttgaggctggcgagaaagccatctgtggccagctttagcaatttacaatttactcttcacctcctggagctggcaagagtgtggcaagaggaaccagacctgaatagaatcctctcaccccagtagctcttcagcagaaaggaatgatacctgagagacagatcaccagattccatcttagcaccttatcaaaatggagagggtggatacagaaggtggcaccccaagtttcctgcttcagttaattcaaggtttgggcaggcaagatttggtgacgcagggtccgagggtggaagagcctggtaagtgtacctcagtgaaatccacttcaccctggaggtaagtggcccagttgtcccctcttcagaaggctcaagaaaacgctctgtttccatggaggctcttagatgtcactgcaaccatctagaaagtttgtatcccctgtatgggaggaggtatgcaacccaggaggggagtagggggtatctaggaaaggccatggctgagagactgaacatgtgagtccctgatggagtagatggggagggtaggttacaaaaggagcctggggctggatgcctaggtcttcgagaggacaccttactgagcacagcagatagaggagaaggcaggtaagctagactctggagagttgcatattgaagtggggctggttggggaactggataccagagtttccaaggaggagacaccttggagtggggaacaggggacccagagccctggcaggtgagagaaatgggtctttcttggaggtggggaggatggatggagacctggctttttgagaaatagagcaaggaggctgtcatagggaagcctggtcttggtggcacaggagagctgagccagttggggctgggggtgttgggatcccgagtggtgggtagggccgggaagtgggtagagcagggtgtaaaggtcctgaccaggcaaaccaggtctttggggcccccaggtgctcacctgagacccagcagagcagaacagacagggtgagcagcataagggctttcatggcgagggtcctgagaatggtggcaaccacagcagctgatagagtagattttcaaggatccagctctaggagttgagtggcctttttggaatttataaacccaaaggctcctcccttccctgcctctggtagcccctcccttctcacttactacgcagctgaccagagaaaagacaaggggtgggaaggcactgagcaggactgagtggggagtagggatgggagagagggatgggggaaggcaggtgccactagtggccaatgccattgtggttcttggtttcaggccaagatgcccttcctggtccccagctaagagtcctgctgctcagtcctctgaatgagcatcatcaaaggcctctgtgatttacagtgtccatggtggcagcttctgctggttcctggaaaatggacaaaaggatgtggcccaaattaattgctgaatttgggtccctgggtccctgctgggcattgataggggcatgctggtggaaattgggggaggaatgggtcaaattaatctccattcagcccccactcggtctttccaatgcctgctcagcaataagtgactcactgatggcttctgtgatgccacagcagcagaggcaggggctggggctactcatccaggagagccaccacaggtctgctaagtagggctgcctcaggctcccatgaaggttctcaggatgtcacccgtgctccacttgcgcttggtgtggccttgttgctccagtccagcagcagcaattgtcctaggtgtggctgtgtgcacctgctccaaagcacctccccagtcaaaacctgccaacttgggcagggtaccaagccaggaggaacagcatgggcacagagaggtgaggtagaagctaaaataagaatagaaatagtaggccgggtgtggtggctcacacctgtaatctcagcactttgggaggccgaggtgggtggatcacaaggtcaagagatcgagaccatcctggccaacatggtgaaaccccatctctactgaaaatacaaaaattagtcaggtgtggtggcatgcacctgtagttccagctactcaggaggctgagacaggagactcacttgaatccaggagccggaggctgcagtgagtcgagattgcactccagcctggccacagagcaagactctgactcaaaaaaaaaaaaaaaaaaaagaatagaaatagtaataataatggcaagcacttacatagtgatcctatgtattctaagcagtttacatgtattactttatttcgttatcacaatcccctacaaaacaggagttttttttgttgttgtttttgagacagggtctggctggctctgtcgcccaggctggagtgcaatggcctgatcacagttcactgcaacctcgacctcctgagctcaagcgatcctccctcctcagcctcctaagtagctgggattacaggcgcacctgaaaagttaagcaggccaaagcatttgtgtaaatggcccgagcacacattttaagtgagaaccatttgaagactccgagtttgcctgcgaggattcccaaagggatctgggcagctggtggccccgccccctctcttatcggagccccccagcccctccgttctccccacgcctaacttccctccggtccccccccaaccggccccacgccgctgattcgctcgcagcttctcctcaccacatcctaaccatggctgtgtttctgcagctgctaccgctgctgctctcgagggcccaagggaaccctgggggtaagcgatccctgggagagttgtgatagacgcagaggggctgaagcaagataagggccgcctagtagggtgggttgtgtgtgggaagatccaggatggctggagtgcagaacagagaagagaaagaggagacgggatggagggtcgtcttgccctgtggacgtgccctaaccacagcctccggcctctcctagcttctctggacggccgccctggggaccgggtgaatctctcctgcggaggagtctctcatcccatccgctgggtctgggcacccagcttcccggcctgcaagggcctgtccaaaggacgccgaccgatcctgtgggcctcttcgagcgggacccccaccgtgcctcccctccagcctttcgtcggccgcctacgctccctggactctggtatccggcggctggagctcctcttgagcgcgggggactcgggcacttttttctgcaagggccgccacgaggacgagagccgtacagtgcttcacgtgctgggggacaggacctattgcaaggcccccgggcctacccatggtaggtgcaggcctgtgcgcacaagggtacttaactccgacacatacccggaggagggaagagggccttggctgggggttcttgagcgggactgctggctgtccctcgtcaaacccctgacctcagcatccctccccgccacgcctttcccccagggtccgtgtatccccagctcctgatcccgctgctgggcgctgggttggtgctcggactgggagctttgggcctggtctggtggctgcacaggtgagcaggagggacccggcctcgttaaatggggagtgaccagaggtggaaggggcaggaccagaaccttcgcaaaagaaagagctagacctagagctctggtcctggcttggcgaagaatgggagaggtcaaaggtgggagcgaggccgctgactggtgagtagagccccaccagagcagatgagctggaagtgcagcagagttagagcctgggctggactgtcggtggggtagagtctaagttgtttccggtctgagccttcaagttgctgggctgtccttggcgtggcgagtcccaggagaaccagtgagacaagactggtggttctcaaagactcatatgtcccttacaggcgcctgcccccgcaaccgattcgaccactccctagatttggtgagactaattccaccccattttctttctcctacatgcccactccccacccctcaattcctgagtctgagcccttgctgggagcagacacgttggtcaccttctctccatccttcagctctgtcccccccacatagctccacttgtgaaaaccgagccccagaggccagtaaaggaggaagagcccaagattccaggggacctggaccaggaaccggtaagggcatggggatgggaaggggatagccagaatctctgaggaaaatggaccaaaaaaaaaaaggcctgaaccccaaggaagactgtggagaccatcttgtcttcctccccttcctcctccagagcctgctctatgcggatctggaccatctagccctcagcaggccccgccggctgtccacagcggaccctgctgatgcctccaccatctatgcagttgtagtttgaagggaagcccttactccaaacctcccaagctaggggatcccagctccccataatccctctcccctccttggttcctcacctggaagaggaaggcaccatggtatagaaataagtgctagactgggagttgggagacctgggttccaggctgtctctgccactggtcttacttctaaacttactcccatctctcctataacctccatgtctccctcaccaccagtgtcctctctatacccaatcaagccctagctccttttttttttttttttgagacggagtctcgctctgttgcccaggctggagtgcagtgacaccatctccctcactgcaagctccgcctgccgggttcacaccattctcctgcctcaggctcctgagtagctgggactacaggcgcccgccaccacgcccagctaattttttgtatttttagtagagacggggtttcactgtgttagccaggatggtcttgatctgctaacctcgtgatccacccgccccggcctcccaaagtgctaggattacaggtgtgagccaccgcgcccggcctgattctttaagctgtttttctttgttgctggtgttttctttttggactcctcttccttgctccatatccctacagtatttcccaccattctaggtttgtccctttctcttcttctgggacactctcatcaacagtcagtcctcagccccctcctctgcaaatgacactcagaactctctctggctcagatctcagatttgggattaacaaacttccacttagacattctgcctgactgacctcaggcatttcgcactctgaatgtcaaacccaactcattgtcatctctgaagctgctcacttaattctcctctgtattctctttaacaacccagttgcccaacccagaaactgggagtcacgcagacctcctttctctcttactcccacacaatgagccatgaagtccagtctttctatcttaacatcactgtcaaacccacactgtattccatgcccagcgctgccacgtgaatgtactctgctcacttccttcctggattacccatagccccacctcatcctcctacccttgctttcctccctgaagtcagagagatcctactcaagagataactgctcctgacagcccttattacagaactgaagtactctccttagcttcagctctgtgcccacgtgccttggctttggatacaaggtactacagcactttgtccactctccaggcttacctgtgtcattccacatgcacatcttagaaaatgccagccttagagaattctccctagccccaaaatgtctttgcccagtgcaattccttcttcctgtattacccctttccctccttcacactatctgcctggctaattcttatttatccttagttcaagtatggccttttctgggaaggtgaccctccttggccaccccttgcatatactttgatgccctagggcgcaccccctttatttccctcatagaaacagccttctgtaaattgttccatgacaacctgtatttcaatttgtaagaaatttgcatgtactgtgagctccccaacgtcaggagactgacccttttgatatcattgctaagcctcattaaatgaatgaatgaaaatgaatgtccctggaagtgtcatttctttttctttatcaaataggggtggactggtaatctaccagtctctgaatcatctaacatttagataaattcagtgagcaatccacccatacactcttttctctgccctggacacacttcccatgatagaaattctgtcttgttcatcttgtgctcaagtacctatgacatggttgggcaatgagttgataagtacctaacaagatttttgaataagaggccttcttccctgcactgaccccaaactcaggtttcagccctgccctatccctttgccccagtaagacaccagtcacagcccagtctaaaaggtcaattctattttattggttctgagagggaggattcacccagtggatccttttccctacactctcccctcccccaatattgaggctctctcccaactactgcctattcagcattctctatctaaccctccttccccttctacttcctatactatcctacccctggccagcagtaccccaaggccaggccctcagctgtgggggcgtgtgctgagcaccaagcagagggagctgagcccggcgccagccttctccagttctgagcaggacacaggtaccagggtgacatcagagagcttctgcagtgcctgcacagggaagacatggagtggggagaggggagtgagacctcaggctgagccaggccactcttccagccagctcagagtggccccacccaggcttctagagaaggtacccttccttcctcccactaggaaagcctgaaactcttttctctgatggtgcttggtgttggagttcctgccctctctcacctcctggctgttgggcagatccccacctccacggtgcaggaggaaagggggcacaccaggcaacccaggacgaagaaagagacagtcagcagctgcgtcatctgggagggtcagggaggcatatgggtgatctgtcagcactgccattgcctagaggaaagaggaagtgttcgagtctcagaacctctccacagctgtgtctgcctgctcaaccaccactaagggctggggacggactgacatttgtggaaaataatgacagcaagcacatagagcttacgatatgtcagacactaagtactttagttacctttgctaatttccaccttggaatcacatgcagttattttcaaccccctaccttccccagcccctcctatctgtcctacccatccttagagtcacagtttaggtgccacctttggggtttcctgaaactccggaagagcaaattaatcacccctgttcccagtcctgctgttgtaacttcttattttctcctgtgttctttcatgtaagatggacagcccattgagggcaggggttagggctaatttcctaagcctcccagctcccggcctcccgggcccagaactgcgcccactttcgttggccccgccccctcctcacccggacagccttttgggcagcgtcgctgctgcctgccacaacagtgcgaggtccccccatgccgcagagaccgcgcaggtgggagggacccgagactggcacagtggagacggcgaagtcctagggagagcgaagggaggtattcaggggcgcgggaggggtgatggggtatcttcaaacataggctgctctctgcctctcatttcctcagcgggcgcccaggcccttccgacccccacctgcaccccctccctccctaggctggtcccgctccgcacccggaacgtgtccgccacgatctcagctcctcggtgattggtccatttggagaggcctacgaaaaactcccggcctgagtccgggaggccgcggaggtttgagggcgggagtgagttagaaacaaggctccagacggccgagtctcccaaactctacttccctgtgccaagacctatgcctccccccagcctcaccggtgaagagaacgtcagtgccatccagcgtcgcgttctcgtctcctatttccacaattcggagccccaggtcttgcagggctttgcggactccatcgaccttaggataggagaagagggcacggagctgtgacacccccatcctcaattcttccccaaagccccgacatccagttccttctgcctttccccataccacacccgcgccacggcgctcacctctggcctacgagcggggctccagggccgcgtgattagggccgtgtccccttggatcacggccgtgtcgccaagcagcggtcccagcggcaatgactcctcaggtggcagttctagcagctgtagccccagtcgttgcctcagtttacctcccagcaccccgtgctccctttgagctttggccagatccagagcgggaaggccagcccccgcaccttcccccgacgccaggctctctgggactccccggatcagggcatgggagcagcggcccagcccctcccccggcgtccccatcccatccacacagactccccctccaaccgctcggatttcttagttttcttgtttcttcacctgtctgggagaagaaacagaaaaggaggagacagagaaaaagacatgcagacaagggcgttgggggtggttaagagcgcccaggtcttcctcctgccatctctaggcgtccctcccactccgccccacccactccagaccttccgctcctgtcgacctcactctacccagcaccctcaggggtcagattctttaagaggagcctgaggaacaaggctagggtctctaatctccaaaacacctgttgcccctgcttgggggcttgtgaggtccctgtcgggcgcccctcttggcagccactaggatgcgctcactccccaaaaatgcagcagccccgcccccttaaccctcagctgctcgctaccgcagggactggaagtccagcccgcgacccgcaggggttatgggacagaaggagaaagctggagaggcaggggctggggaatggaagtcctgaatacccgaacgagaagggagagaggtgggtaggaagggaggagttcgagcctaaggagttaagcatcctctctccgccctggctggtcacgctgcccctagcgcgacctagtataaaccagaccgagtcccgaaggactgggagaggtctaaaacgaaatgcgaggggcggggtaacagggggcgtggttccggggcgctggcactactcccggctccaggacccggttccccgtctatgtcccaaagtccaccccgcctagctccgcgcccaaataccggctccccatactctctgtctggtgcaggcatgggcccggcacccccaaactccggcccccacacggttcagggccccccacgcaagactcacctccagcggccacccccactcctgtcgcgctgtgatctcggctggggccccaccccccgaggacagagttggtggagaagggagtccccgtcttcaagcctcggggactgggagctctggcttttagcgcgggtccttgtgtaggcgagctcatatactacgatggggcaggggcgcgacggtctggcggctccggggcattgtctaagcgggacggggcggggcttcttcgggccacgcccattccgccctgctaagcctcgcccattacatccagactgcgccccccttgccagaaatcggcaccgcccagcgagcgctgcccaggcccacccagatctggccggccctggcgacggggctgcaaacgcttcgtagacctcagaacagcgcaacggcggaccggcggaccggcacgaaacatagcagccccaccacaaacatttcccttcttaattcctggcttctgccctgagctcaagatcactgacccacccctcattccatgtcgcccacactttaaatccccattgcgtaaaaacacttgatttttattctgtattttattactgaaatatgttgtcctactcatcccaccccacaataaaaatctgacccaggccccccatttctttccctcatcccctcttccaccacaccatcccggaacaagtgctccaggattccctgcccactggccattttggagtgtgtccattgggtagcaatgtggaaaccaccagggcctttgtggagaaaatggagggggttgagggagtcccaggaggggcttatttgagggcctttgccacttgctcataggcgagctcgatctcctcatcatctggacaggtggaagcgaattcttcccgggcgtaggcattgctcaagtaccgatgcactccccggaaggcctcggggatggtgaatccccggtacttcttacacaccacctgaggatggggagaggagagggaccaacatgttagacccagggaagccaccttggctttcccttctccccaggccgacatgataaaaccagctcaactcctcactgtcttgtactgtcgttagccttccttctcacttactgaaatcctggcttttaataaccagccatttttcctgagtttttaaaacttgagatataatttacttataaaattctcctcttgaatttccacagtgactttttccccctataccacttcaggcactgacacaggtgacttttgtctctatatttttcatcagacttttttttttttgagatggagtcttgctgtcacccaggctggagtgcaatggcgcgatcttggctcactgcaacctccgcctcccgggttcaagtgattctcctgcctcagcctcccaaatagctgtgattacaggtgcccaccaccatgtgcggctaatttttgtaattttagtagagatggggtttcaccatgttggccaggctggtctcgaactcctaacctcaggtggtccaccagccttggccgcccaaagtgttgggattataggcgtgagccaccacgcccggcccatctgacttttcatcatatattcttaactttcatgtgaatattttattgtctcagatttcaaccctttgagagcaaggcccagtcaccatacacttgtgtatctttcaatgcttagtacacagatgttcactacatagttgtgtggcagactgatgtcaggcccatgttgcacaaactaaaccatagctttgagactatgacaaaaacatgggaaccagcagttttgatcttccacaagaggaagtgaagactgaagttataaagaaagttaaagctttgactttaggaaaagcctgctctgtctaatctgggaatttggcagtgataccgagacaggaagagcattcttcaaaagtaatactgggatgtattcctctttgctagtctgtttgcacccatgacttacatcatggaatataattatctcaagcagtggtcttgttagcaatgactgctgcaaaggactggggtggggtctgccattggtagcaatttatgaaaaccaccctaagaaagaaatcgtctttagagtggttgtcaggggaagcccatgtgggagctccttaaagggccactccagtggtcatcctctcctcccgcaataaccacacacctgtactatgtgtaactttggcaacaggttgcagtcagccagggtgagctcgttgccatccaaaaacttcctctgagagacaccttcatcttcagcactggtttcatccacttcttctgggaggggggatgttaagtaattgtctaaaaccttcagggctttcaggagtcccttctccagatctgtgcaagagagggaactgattagaacttcaggaaaagattgacatagtccgaaaaggcccgttgggggtggatactaatggtgagtccaaaataataatagctaacactcatgtagttacttttctatgtgttattctaagcactttacattttattttatgttagacggagtcttgctccgttgcccaggctggagtgcagtggcatgatcccggctcactgcaacctctgcctcctagattcaaatgattctcctgcctcagcctcctgagtagctgggattacaggtgcctgccaccacaactggctaatttttgtatttttttcagtagagaccagtcatgttggccaggctggtctccaactcctaacctcaggtggtgcgctagcctcggcctcccaaagtgaacactttacattttacaaactcatttatatcgccgggtgcagtggctcactcctgtaatcccagcactttgggaggccgaggcaggtggatcacctgaggtcgggagttcaagaccagcctggccaacatggtgaaaccctgtctctactaaaaatacaaaaattagctgggcgtggtgatgcacgtctgtaatcccagctactcaggaggctgaggcaggagaattgcttgaacccggcaggcagaggttgcagtgagctgattgcaccactgcactccagcctgggcgacagaacgagactccatctcaaaaaaaaagaaaaaaaaaaatttatatcaacccatgaaataggtattgtcatcctaattttgtggatctggaaatggacttacagagaggtgaaatgattgctcaaaattatacggctagttggatttgtactcaggtagtctggatctagagtgatgactgttcttaagcatgaccctattctgccagaaaacaggccagcagccaactaacgtcctcagtggggcagaagaggctagggaacaaatgagaaaagcttaaaagtcttggccaatgaaaatgcagggaaatatagaggtaaagcaaaaatgggaagctgggggaaatttacgaacatctgcttcatctccctgatatctgaacgtccaggtgcccctaatgtctcctacccgctgggtcctctctattcctcccaggacccaggcctctgacccacaagactcactgtcattgagtgctgggtttgaattcttgatgtaggcagaaaatttggcaaatatgtccagcccagctgtgttggactcagggttcagagctgccagcttggggtacctgaaagccaatgggaaaaatgaggtaagatgtcttcctgggaggaacctcagctagctctcctgccccagccccaccaccatctctgttttccatttctgcaaactgtctgtttcccagaatctccctgctccacctctccactttctgagtgcccctatacctgggagggcacagcactgcctccagaaattcctcaatcttgttggtgtctgtgtgcacttcagtgccatacagcaggaatgggagctgcccccctgggcacagcttctgcactgtctcggtccgcctggagaaaggatcaggaatcaggactggaaatgggggtcaggaagaaccagaaagggggaatggaggacgtgggataagaaagggactccagggggagggcaaaaatgttcatgacagaaggactcgggtgggtgtgtgtttgcacacatgtgtacaccaggggtgtttcaaggaacataagcaggcctaccttttggtgtcaacggtggtaacattgaaggtgactcccttgagccacagtaccatgaacagtctctgggagaatgggcagttcccaatcttggccccatcactgccagcctgaaaagtaaccccaacccaaggttatgcctgatgcaccccacccatccctaggccagtccctgcattcccactcccagaccagctgttttctgcctagtcatgacacatacactgtcccctcactatgggctctttgcccttgggcctgggtcaaacctaaggcagatcaatgggaaactgttttgcaaaggcaggcttctggttccccagacactgaggacaggtgggaggtaggtagagggaggaggtcctggagaacttgggaggatctgaatcctagagagggaagggtgtggaacttcagtgaggccagagttgtaggctagaagcctggatttctgggttcctgaagggagtagagtctgaagacaggagaggtgggtggggtttgggagccagagttttggttctctacacctccaatccaaggtgtctttgggtggggagtctagtcaaggggccctgggcctcgcgctagagatgtggagggccctacagagaggggctgccctctaattagcaagtggtgacctcattggcccaagggacacctccccctaagctgagggtgattcatctctctgtctccggcttccttcctgtcaaggatgtgggggaagggacagtgaggatgaggcctgggcagctaaggctacccctaacctgctgccagggtctcccagcacaagtcctctgactgcaataaccatcctctcacaggacacagggccggaatctctgcggcacagcctcacccacgagtaaaaatagccccggaggcgaatgtgagagtgaggtggggaccacacctaagggggcggacccaagcaggctccgacttccctgggcccagggagagggaatggctgcccgagaaacccaagcagaagggagagggagacacaggcagagacacacaaagatgagagaaacaaaaggggggaaggggaaagaaaggcggcaggaaagtggagagtggggagacgtgcgtgccaacggagagacacaaacggagcggggagaagaggacactgttaaggaagggagggaggggcacagccaggaggtcccaagactgggaaatgaatgcagcagcggtagggaggggagcggccgctgcaatcagaggggggctgggtgacaccgagaagcctgctgcctgcagttttgctacccaaatgccataggaccatctctccttacccacacccgcagagagaggagagagttggggcaagtcttctacttctccaacccccaaatcccaaaatgccctaaccgagctcttctcctccgtctgatctctctcccacccatccttgtggtagctacgttaaactcacgtcttcttgccacctccccttctgtccctttccccagtcctggggatattcaatgccacccgatcacctctccagctctgcttttcaaactccgatcccagtctcctgttttgttccgcccctccaaagcttcccaatttacttgctctcactctcaggcctccctcaacacaccgtcttccctgaagcgtctccatccacacacacacacacacacacacacacacacacacacacacacctctcctactgcactactcaccctcagatcttgtagggacacatgtcctaactgaggttcccctctgtcccttctaaaccctgctgggcccccactgtcccttcaccagctcgccctctaaccccaccccagtctcacttttgggaattctcctttttctccacttcccttcctttagtctgctagaaacttgcacttttacaaacttttcagggttgatcctagaattctcattacttgctaacaagttaatgtcttcccctctcaaaaccacccctcaaccaaagagtgcacgtgggattgggggtgggagtcaaggagggaagggattggggagttaaggctggaccgggggaaaggtgagagttggcttccaggaatttgggtggctgaggagagaagtgttcttaccttcacgaacaattcgacctgcggttgttcttcagccatggttgcgtcggggaccaggaagtggccgtccctgggggaactgggaggggctgggaccggggaaggcgggtctcacactcagggactctctcccctagacccagggctgtcccttcagcacaacacaagctcaatcagacctacttgcacccaaactaggcctccccaccagcccaacgcaccccacacccagctcctccagctcggtcctctcccgggctggatcagagagccgctgactcaccgaccggccccgccctgaacctggggaggggactggaggggggcgggactcgacgatgtagggagtgagtccggaaggggaatcctcggatctcccacaggatggggatgggggtgttaaggaggagtcctgaaaacctccttgtttctccgacctctcctgaacacaggactcttttctgcctcagtttccctgcttcattaatctgagtacaacccgactgaccctcatataaaaaacttgacactaacagcttgggcacacccgtgaagattcagggatggggacttcaaatggaaaggtggtcgtttaatcattctgcatttcttccagactccaatccaaattctgggttgctgggactgtggtctgagagaagaactcggaagtggaaggctgggactgcagataggaaccgttagccatgcagcctgggattagggaaggggtgacgccagcactccctgagctgcccagactggtgtctcagtaggtcctgtgccccccgcagtctactgtctccgggcccagctcagcactaggacttgcagtccttgtggcctacacttgggattgggcataggaaatagagttaggggccgggtgaggtggctcacgcctgtaatcccaacactttaggaggccaaggggggtggatcacctgaggtcagggagtcaagaccagactggccaacatggtgaaaccctgtctctactaaaaatacaaaaatttgccaggcggggtggtgggcacctgtaatcccagctacttgggaggctgaggcaggagaatcaattgaacccgggaggtgaaggttgcagtgagctgagatggtgccattgcactccagcctgggcaataagagcgaaactccatctcaaaaaaaaaaaaaaaaaaagaagaagaagaaaagaaaaagaaagtagagttagggatgggaagggagatgacgaagtcttttgcgaaggaaacataaagccgaggcaaggggctttgttgcagggaggggtctgttcctgtagcttggtcagctttgtgcttccacttatgtttcctattggggccccttcctgtgccctttgtcctcgtctcactgacaggttgccttggagatggggcagaggggtgggattatcatggcccgatcctgaagtatgtgtatagggggtggggtaggggtgttgttagctggtcctgtcatggggataaagaaagatcagacagaatagtgggagtagagtccttggggacacctaaataaataagcagggaggacataggaggagcagctctctctccagtaaccttgatttctattaaacctttatgacctgctgaaaaaataaacccagaattccagcctccatatcctgaatttctctcctgtccaaccatcccttctctatcctcctcatcaccctctgtccaacaaaagacctacagttccagaaaaccatggtggagtgcaagaacacagaactaaaacagagcttgaaacttaaagaaagggagagacttgggggaggagtggggtggagtgacgtgatgtgctgctggaaaccagcagttggtggtttcctcttgtgcttcctcttctgtgggttttctcctgcttgtgggagggcctttttctctcctcccgacagaaaggctatctttggtgttcgttcccttgaactgtaacatcctgtaagggtatgattccatgcctctgtgtgggtgtgaattccctcatggtgaccctcaaaatctgcacacaggaccccttcccattgaggggaggggatcaaaacaactctacttctcagggtcctctcctgttccaactggtctgtgtccaagagaagccttaggtaaatggggccagcttgaagatcaaacaggtttggcagcctctcccggcctctcttttctctcctacagctttatagctacagctgccttgatatcaatattgactttggctggctggcatgactacccacagggtatcgtgccttaatttaccaggtgacaggcaacgctgccctctcctggaaccatccagcagagccagggctgtacccccaaatcctgcaacagaggtttccctccatctcacctccctgtccctgcatttctcctatctcagtagctcctctttccctctctgggcttctctttccactccctccccttcctgggcttggtaaactagtccctaatctcttcacaccccagattggaaggtgggtccctccctgacactccccagagctgtcaccaacctcctccaagtttctatagctccattgctcaacagatttgccaggggtaaccattaacccagcccttaactctgttcccccacctttcttgctggaggggattttccaattactggttagcacagctaggtcatctcacccccaccatctttcctaacttcttgggttggggggctggggaggaatctccccatctcagggtactaggaacaaagctggggaggatggtgcatttaaagggattatatatatatatatatatattttttttctttctccctcataaccccacccccgcaacacacacacacacacacacacacacacacacacacacagacgcacaaataagctttatggagcagtgacttcattatgttcaccgctttgagtccaacccctggcccaaaataggcactaaatagttgccgaatgcatgaatgatagatacctctctgtcttcaggggtgtgtagaagtgcgaaggggtatgggcatgtcccagtaggggtgtgagtgttctgatcagaactacttctctctgccagaatttgatgtaattcgaatgcttccacctctgcttgaagggtttaaataataaattaggccctgtcgtgccattatgggggtggtcataccctgtacccaggaaacaggcacggtagggctgagacagaagtcctgcttgtttccgcttatttatttgaaacaccgctcatttaggtcttactttgtttgccaggcactgttctaagctctgtataaatattaactcagagggtacaaatattaacttaagagttgttgcaggaaaaaaaataagcgcctctggctctttaagtttggcctccccctcaaaacccccgcaacggtcccaaaccccttccagggactgggactacggaccctggtccgaccttctcgcgggcttcccactgcgccaatcaaatcccagaaacagtgagtgctagaggcccggctgctaagcaacggcagagggcgggaagtttgaacgttctggacccgccccgaaggcaaataggccaatcagcgtccagactcttcagctacggcagtccgcttctcctcctcgccctgtcggatctctaggctggatccgggcctctccaatcaacagcggttaggagggcggggcgcgtgcgcgcgcacctcgctcacgcgccggcgcgctccttttgcaggctcgtggcggtcggtcagcggggcgttctcccacctgtagcgactcaggttactgaaaaggcgggaaaacgctgcgatggcggcagctgggggaggaggaagataagcgcgtgaggctggggtcctggcgcgtggttggcagaggcagagacataagacgtgcacgactcgccccacagggccctcagaccccttccttccaaagggtaacctccgcgtgacaggaatgagggtggggcgcgtggagtttcccacaatctgtactttagttaaatacccgagaattcacctcctgtgtccacagctctccacgcccctcagccctgccccgcagccctgtagcagaagtacttagtgctttgcattctgcgcgccaccctaccccggcctcctctgtgaatcgttgcttccgaaccgccctcactttttgcatccgcagagcctccaagctcatggcctccttaggagcgaacccaaggaggacaccgcagggaccgagacctggggcggcctcctccggcttccccagcccggccccagtgccgggccccagggaggccgaggaggaggaagtcgaggaggaggaggagctggccgaggtctctgaggggagtagaaacttgaatggagagttgatgggaagttagaataaaagagggttgggagccgggcgcggtggctcacacctgtaatcttagcactttgggagactgaggcgggcggatcacctgagctcaggagttggagaccagcctgggcaacatggcgaaaccccgtctctactaaaaatataaaaattagccgagcgtggtggcacgtgcctgttatcccagctactgggaaggctgaggcaggagaatcactgtaactcgggaggcggaggttgcaatgagctgagattgctccactgcacttcagcctgggcgacagagcaagactccgtctcaaagaaagaaagaaaaaaaaaacagggttgggaagagctgggcaagtctcttacctcctgagtggctgtttcacattcactaaatgggggtgatgatgcctatctcagagatttgagaaaatgattaaattatataagacatggtaaaccctacacttatgagtgattctaatagtgatttcctttcttccttgctggacagatccatctgtgtgtgctgtggaattcaggatacttgggcattgcctactatgatactagtgactccactatccacttcatgccagatgccccagaccacgagagcctcaagcttctccagagaggtggggatggaaccatgaattcctctgctctctgggattgcagatgtgttacacacacacacacacacacacacacacacacacacacacacacacatattttttttttctagacagagtcttgctctgttacccaggctcaagtgcagtggcgcaatcttggctcactgcagcctccacctcctgggttcaagcaattctcctgactcaacctcccgagtagctgggactacaggcgtgtgccaccacacccagctagttttttgtgtgtgtttttagcacagacggtgtttcaccatgttggccagggtggtctcaaactcctgaccttgtgatccgcccaccttggcctcctaaagtgctgggactacaggtgtgagtcaccacgcccagccatgttttacttacattaactcacctcactgtctagcatattttgtgttgctgtaaggaaatacctgactctgagtaatttgttaaaaaaaaaaaaaaagttttatttggcttatggttctggatggttggaaagctcaaaattgggcatcttcactggtgagagcctcagactgcttcaactcatggaagaagggaaggcagggtgtgtagaggtcacatggcagagaagaagcaagggggagggagatgccaggctctttttgacaaccagctctctcaggaactaatagagtgagaacctctcactcatacccaccaacacactccaggaagggcattaatctgttcatgagcgatccactcccatcacccacacacctcctgctaggccctacctcacaacactatcacactggggattaaatttcaacacgatatttggcagggacaaatcacatccaaactatagcactgactcaatatattttacagttgcttcacagaggctccctcttttgtttttatgaattcatttcattatttaacaaatatttgtgaggctgttttttggtttgtttggttgttcttttttgagacagtgtcttgctccgtcactcaggctggaagtgtagtggtgccatcttggctcactgcaacctccgtctcccggattcaagcaattctcctgcctcagtctcccgagtagctgggattacaagaatctgccatcacgcctggctaatttttatatttttagtagaggcagggtttcaccacgttggctaggcttgtcttgagctcctggcctccagtgatctgcctgccttggcctcccaaagggcagggattataggcatgagccactgtgcctggccacaaatatatatgacgtatttacaatgtttcaggtgcttcagattcagccctgggcaaatcagtcatgtctgttctccaggggtttacagcctagtgacaacatccagaacatcccacttccctctcaccatcccaccactcttaactacttttctaaatctcaacttctacctgtgttcccactgtgcagagcactccctactcctagggaggaaatgtttttgagaaggagaggggtaggaagaggagggctatgggttttctcttagtcaaagacaaagatcctttaactcatttgatctctgttctccttccaagttctggatgagatcaatccccagtctgttgttacgagtgccaaacaggatgagaatatgactcgatttctgggaaagcttggtaaggacttggtaaaggatagagggaaaatggggaaggactaatatatggaatattccagggggctagaattgggtgagagggagtgtcagacagaggtagaaggactgagatgtaaagaatgatagccttttctttcctcccccacagcctcccaggagcacagagagcctaaaagacctgaaatcatatttttgccaagtgtggattttggtatctccttccttttgctttgcctaactccctgttccggtgtcccattctttcccccaactctaccttcatcatcacagatctcccctctgccttatgtcatcctaaacctttgtgctcctcatgccctatgacctgtccccccaagatctctcctgctccctaccctttaataacctgcagcttattgggaagcctctgcttaagtcatgtctagggatgagggcctcccctgaggagtggtgacactttttggacagggttttattgttggaattctccccattaagttaaagccttttatcaccaaaccaaaaggcactgcctcagtgacccttattatgatccataaggcacttctataactttcctaggtttacaataagaacaggagtgtactatcctaattagatattaaggcattagtgttactagttctattaataccattattttgaccaaaatcctcaattccagacagatgtctactttcctcagccatttatctttctcaggctgtgctttcagacaagtatctttatattatatgtagaataaaaagagaattagactaagagtctgaaaatttggttcttgctctagctttccattaactgcctgtgtgagcttgggcaagtcaaataatctctcttgcttctattgtctcattcttaaaatggggtgaaaaaattgagctacaagaccgttccctttgcttgcctccctcaaataggtctggagataagcaaacaacgcctcctttctggaaactactccttcatcccagacgccatgactgccactgagaaaatcctcttcctctcttccattattccctttgactgcctcctcacagtgagattggtcctgggggataagggctgggaggcggcacaagtgctagggctgaattctgggaggtactggcctagccctggaaaatagtaactttccctggtgctctgcagcccccaggagatttaagatttaccccgattccactgctgatcccctcccaggttcgagcacttggagggctgctgaagttcctgggtcgaagaagaatcggggttgaactggaagactataatgtcagcgtccccatcctgggctttaagaaatttatgttgtaggtgattcaccccaaccccaaccaaagtaatgtgggattgggaggcctgaaaagtaaagtgggggtggggtgtggatgtggctgtgacccagtgggtcaagtgctctaggacacccgggagaatctaagggctaatgagactttgggaagaagactgggacaatattcagagagggggacaaaggaagtggagttgtggaacgaactcagactgcttcctgcttttttgttttctgtcctcaggactcatctggtgaacatagatcaagacacttacaggtaaagaggtggaggcatgctgctgtctctggggagggagaaggattaagtttaatgccccaataatcctaatgaggctctagtttccctaatcctggggctattaagatctctctccttgaaggaaagggaaggggggttttgagggaaagagaggaagaaaagcataaagatactagctttcttttctatagggagaaactgaggcaaagaaaagtaagggacaaaccttacatcaagatatgatctcggctgggcgcggtggctcatgcctgtaatccccgcgctttgggaggccaaggcgggtggatcgcctgaggtcaggagtttgagacctgaccaatatggtaaaaccccgtctctactaaaaatataaaaattagctgggtgtgttgtgcgcctgtaatcccagccactcaggaggctgaggcaggattgcttgaatccaggaggcagaggttgcagtgagctgaaattgcaccactgcactccagcctgggcgacagagcgagactccatctcaaaaaaaaaaaaaaaaaaaaaaagacgtgatctcaggaggatatcccctgtccccattccatttatcagtcctcaattcttattcccttcaaaagtccaagttaccccaaactcctccatttctcctcgacagtgttctacagatttttaagagtgagtctcacccctcagtgtacaaagtggccagtggactgaaggaggggctcagcctctttggtaggtgtgccccatccctcatctcacattacaaagacctaccagaaaagcaattggctccaaagatgtgtcccagcctcccttcccacttcactcccattgtcagatatctctttcatgccaatccaaatttcttacctatttgtaccccccgccccccaagcttgagcatcttcccatactttgtggctgtacagtgttgttgcatatcagccattactttaccaattctgtgttccttccctgggtttgtatgaatgtttctactagttgggtacctgttagggactttgggagaccttgtgtatagagaagagttttgtaactgcataactgcctatttgatttgtatagagtctttatcagttgtctctggctttagggtatattagggacatctccgcaaatatccatatagtttcatatctcagtaagttgtgtccaggttttttttttttttttttttgatacagagtctcgctctgtcgcccaggctggagtgcagtggtgcaatatcagctcactgcaagctctgcctcctgggttcacaccattctgctgcctcagcctcctgagtagctaggactacaggtgcccaccacgatgcctggctaatttttgtatttttagtagagaacgggtttcactgtgttagccaggatgatctcgatctcctgacctcgtgatccgtccacctcggcctcccaaagtgctgggattacaggcgtgagccaccgcgcctggccagttgtgtccagttttgtgtgtgtgtgtgtgtgtgtgtgtgtgtgtgtgagacgaagtctcgctcttgtcccccaggctggagtgcaatggtgcgatctcggctcaatgcaacctctgcctcctgggttcaagcgattctcctgcctcagcctcctgagtaactgggattacaggcacctgccaccacgcccagctaatttttgtatttttagtagagacggggtttcaccatgttgcccaggctggtc

SEQ ID NO: 511 - DNA, 96859 bp, Homo sapiens
tagggaaaatagaaagaacgtatgctgaaatattgggggctggttcccccgatagtgggtcctttgggaagtaattaggctataagaatggaagggattacagcccttataaaaagaactcagagagctagcttgtcctcttcccatcatgtgaggatgcaatgagaagttagcagtctgcaacccagaagccctcaccaaagccctaccatcagagtgccctaacctggcactctgatctcctacttctagcctcttgaactctgaaaaataaatttctgttgtttatgagccacccaatctatagtactttgttaaagcagcccaaactgaccaagacaaatggaggcagttactacatagtattcacaattgacatgtaatctgcaacacctatatcacgttgccataggatttctcaataataaaaacagctttcagttaatgcatatagaataagatcaagttggatgtcagagaaggaaggaggagaggttaatctattgccttgttttgaacaacaacaacaaaaaaaagcaggggagggatgtaataatatattgtaggaaaacactttataaaatgagtagcttatctagcatttagacattggctatttcattaaatctctaggaactgaattgaagtttaataaactaatgagaggacctttgattttccttgcaccagaaaacagagaatgatgcctgtgaaatgaaaggtttatcatatgtgagatagcttcatcctgcaaggaaattgatattatgcttgttactttctacatgtattcaaggactagtatcaccatccacatttcacaggtgatcactgaatatttttcaggaatttcttacattgctaatgattagaagttgcttttctcatcattccagtgtataatcaggccagcatatttcagagagaagcgcaatcacaaatccaggttctgattaatagaaagctaacaggtaagaaatatttagcagaaattcaaaaatcaagggaatagtagaaaactaaaactgagacaaatactgtcattgtttgtttttaagatgccactgcatataaatacatgtatctcttgattttcacactccatttggaaacctgcacccccttctctctccccagggcaatgcagagaggtgcagtggactcagctaggctgggagagtcagacacagcatggcctgagaggcccctcagccactggagccctatctttgccccaacctgcctgtctctgtgccaggctggataaggcacaggagaacttaattgagaataagcttcactctgtgctggggctggtgggggtgttgaaggaagaggaaaagcttgaatctttaaaaatagttggccatttgcaattacaattcttttcactcttaaatattcaatagggaaaaggacaggcatgacctttgaaaggggctggtagttttctggaagctgctatggctggttaatagaaatgagatacggtccaagttgcaaagatgctaaaatattttataaagaaaaggagatataacttgaaaactgtcactttctttagactttaggggactgctgcttttcacccttcccatataacagaatgcaatgcagagaacacaacttcttcttcccatagtccttttcatctgggtccttcttctggcttccctggtgatcagcactgaatgtcagagctgcgactctagcagttgtcctttgtcagcaaagctttaccccatcgggggagtaactcagacctttaatttcctcaaacatcactcacggctcaagtatttaagaaaacctcattgaagactcaatggtaacaaccaaacaacaacaacaacaaaacaggagagctcattacatgagaaacttaaaacttgatataaactctgatatttccctgattttaccccaacacctgttcttagagggtgatattatgtagatctcttttctcaatctgaagttgctggtgtggtctatgtcctactcatccttactaaaaagcagaaaaaagaaagaagaagaaaggaaggaagggaagggaagggaagggaaggaaagagaagggaagggaagggaggcatgcaggcaggcaggcctcttttttaacagcttttagtccacagccccaaatacctttatctgaacccaggccaaaatattaaaagtacccttattataatctgttcagacaactcagttttagttgttgtcatggtattcgtgttgttttgctggactcatgacttaaaaaatcttgatctaaagctcagtcttttcattacttttctagtaaagagttttcccaagaaaacatcttatcagtgcagttccttccaatttaaacaagaggcctcctcaaggctaattttcatttcattgtattttattgtgttaagaacacaacatgagatctactcccttcttaagaaattgttaagtgtatagtacattattgttggtacaatgttgcacagtagatctctagagcttattattttgcctgacttaaactttatgcctgttgattagcaaccccattctctctaccctcaggccctggcaaccgccctttcattgagttcataaatttgactattttggacacatcatatatgtggaatcatacaatgtttgtctttctgtgactagtttatttcacttagcatactattttcaaggttcatctgcattgttgcaaatcacagaactcaaagtggatttaagacttacatgtaaggtcccaaactgtaaaagttctagaggaaacacaggggaaaaaaacttcacggcaatgttcttggggatgattttatgcatatgacaccaaaagcataggcaacaaaaacaaaaacagacaagtgaaatgacatcaaactaaaaatcttctatacagcaagataaacaatcaatagagtgaaagggcaactaatagaatgggaaaaatatttgcaaaccatatgtctgataagaggttataatccaaagtacataaggaaattctacaactcaatagtaaaataaataaataaataaataaataaataaataaacaaacaaacacctctttaaaatgggctaaggagaatggacatttctcaacagaaaacataaaaatggccaacaagtgtgtgaaaagttgctcaacatcactaatcattagggaaatgtaaatcaaaaccataatgagatatcacctcatacatgctacaatggccattataaataaaaccaaagcaaaacaagacaaaaaaatgagtaaataatatgtgtacacaaggatatggagaaattgggacccttatacactgttggtgagaatgcaaaatggtacagccactagggaaaacagcatggagattcctcaaaaaattaaaaatagaactaccatatgatccagcaattctacttctggttcaattcactagaattgaaatcaggtttttgaagagatattagcactcttatgttcattgcagcattattcataatagccaagatgtgaaaataaccaaaatattaaaacttaaactgtcacattaatcattttaaaagtttatttgagcaaacagcaatttatgaattggacagcactcaattgtggtgctagttggtcggggaggaaaggtttcaaagacagggttttataaggtgagtgggaaagcaaagcaaagaaaataattgtttacagttatgtagttgccttatttggattacccagtggaaatttctagttatgcagtttgaagttagtggtttctgattgattaagtttaaattttatctctctctaagttagttacaaggaaggcattcaagttagatttaggttgcttatattggatctcagggcactgaagctgcctcaggtgaattgcctcctatttagttattttagcaatgtttattgacagataaatgaataaacaaagtgtgatatgtccacacagtggaatattattcagccttttaaataaacaagggcaaatttttatttcttcattgaaatgttaaaattatgatgccaaaatgaaaacctctgtagttttgataatgttaatattaaaaaacacctccaaaaatcaatggaagatcttttgtgtaaggaggtgttaagcctttatgacgaaaaagggaaaagagctgcactcaaatgtttagtggccagattagcaaatgactaatacttaacttttttgtatgtaaaatttgtagctaaacttcttggtaaattgaggttttaaaatcagggagaaggacttctgcttctggaaagatggagtagacatcttttttttcctatttcttctactaagttcaactaaaaactctggacattacatataaaacaaacataagaagacattgaaggtagaaaaagaagacagactagctagcaaactctggattcaaggaacaacattctggtaagttacttgggttttttctttgcctcatatatctcagttgaagaagctggcaatcggcaaacaccaacagatacagaaaataagagacccataaaaggccattttttctagccaaagtaccaggaaaggaacaacctagcaagacaaaaatcttttatacggtaaatgctttattctagccatctaccacagaaaagaactgtggctccacacttaccagtaagggtggggaaagtagacttccacattttctaggcacctaattcctcccttgtggtgtcagagaaggccaattagaaagccaggactttcatccttattgggtagataataagccatctccctccccttgatgtcagtggtgactacttgtggatgtagaatttctatccatcataaggtgacctccacccactcctgactggagtgatatcagaggaagttaaatagagaatcaggattgccatcaacgccagtgctaataagacccctccattctggtgtaagcagaggctctgtgggaagcagttaaaaggcactcctatcccttccagacaaggcgatgttcagtggaggcctactggagagctacaactccatccttttcctgcagcaatgaggaatcttcctaccctcaggtgtcaatgcatgtaattgtggaacctgtgcttctatcctcacctggcagtaggtggtgctcacatctttccatgctagaatggtgtcaaaataagacagctaaacagaaagattaaataagaacaagagttccataaaacacccaaaatatccaggtttcaattgaaaaacactcattatggcaaggatcagaaagatctcaaaaatgaaaaaaaggcaatcaacagatgccaaaacagagatgacaacaatgttagaaatatctgacaagattttaaaagtcatcataaaaatttttcatgagcaatttataaacatattagagaaaaaatcagaatgtctcagaaaaaagaaaaatctcaacagtaatatagaagatataaataagaaccaaatggaaattttagaactaaaaaataccataattataaaaaaactcaatgaatgggctcaaaaaattgaatagaatggaaagaagagtcagtggacttcaagatagaaaaaagaaattacttaatctgtaaaacaaatcagacagaaaaaaatagagctttaggaacctgtatgtggaggctaaagcaacttcatcttggaggctaatccaccatgttgacatctgattaacccctattctaggaaggcctctaagatttccagtatgtcttttgtttcttggcaaagagcacttacttactgtaaatcctgctcttaggtcaaaacaaccttgatgttattgtacttcaattgtcctacacatcccttcggaatgtaggaggttccaacacctggtctcgccacagcccaaaacacagacatggcttctatctgtaggcccttattaaacatgtatttctgagaaactggatatgccagcctctttctttggcctctcaacttccttggactttgaggataggcttgtataggataggcccaccatggaacactgtgaaactataataaagttctgactctcatgccatctacatctggaagaaagataaaaaagggagagaataaaaaggtactcaaagaaataatgactgaaaacttcccaaatttggcataaggcacaatcctatagattcaagaagctgagtgaactcccaaaagaaaaaaacaaaggacatgccaagaaacatgtggtcaaacttctgaaaactaaagataaagaaaaattattaaaaacagcaagcactgaaaaaaaagaacagtcaatttagaatcttatttctagcataaatagtctcataatgaaaaagctgtctaaagagacatccttaaaaatattacagataaatcaaaattgaattataaaaaatgtttaagatagctccaggaaaaagtaagcagagaaataaaaagcaaagatgataaacaaaacaccaaaaataaaatggctggcttgagccctaaaatatcaataattacattaaaactaaatggattaaatactccaattagacttttataacttacatactttgcagataacatgattgtctacagagactttcaagggctgtacacaataaaacccctagaactagtaagtgctttcagtgaggtttcataaacataaaaagctacattatcaggttggtgcaaacataattgcagttgttgcattgttgaaatttgctgtttgatattggaatacattcttaaataaatgtggttatgttgtacatcattttaacgcacatttctcgctttttttgcgaatgacttattacttgctctttattttatatttattttagactctggaaatgatattagataaaaagcaaatttgagcgattttcttattgagttcaaaatggatcataaagcagcagagacaaattgcaacatcaacaatgcatttagcccagaaattgctgacaaaggtacagtgcagtggtggttcaagaagttttgcaaaggagacaagagccttgaagatgaggagcatagtgaccggccatgtgaagctgatgaccaattgagagcaatcattgaagctgatcctcctacaactacacgagaagttgctgaataactcaatgtcgaccattctatggttgtttggcatttgaagcaaattggaaaagtgaaaaagcgataagtgggtgcttcatgagctgagtgaaaattttaaaaaactgtcattttgaagtgttgtcatctcttattctatgcaacaacaatgaaccatttctcaatcggattgtgatgtgtgatgaaaagtggattttgtatgacaaccagctccgtggttggacggagaaaaagctccaaagctcttcccaaagccaaacttacaccaaaaaaaaagtctttgtcactgtttggtggtctactgccggtatgatccaaaatagctttctgaatcttggcgaaatcattacatctaagaagtatgctcagccaatcgatgagataaattgaaaactgcaatgcctgcagcaggcattggtcaacagaaatggcccaattcttctccgtgacagcggctgaccccatgtcacacaaacaatgcttcaaaagtcaaatgaattgggctacaaagttttgcctcatctgttatattcacgtgacccctcgccaactgactaccacttcttcaaggatctcaacaactttttgcagggaaaacacttccacaaccagtagggtgcagaaaatgctttccaagattgcatcaaattctgaagcacagatttttacactacaagaataagcaaacatttcttattggcaaaaatgcgttgattgtaatggttcctattttgattgataaagatatgtttgagactagttataatgatttaaaattcacagtccaaaatggaaattactcttacaacaacctaatatatttctaaatagtagcaaagaatgcaaggtagtaatattaaaaatacaataccactaaaatcaggaaaaaaagagacacttaggtataaatctaacaagacatgtagaggactgtatgaggtatcaagagtattctagaaactacaaagtgctgagaaatcaaatagataagaagcctcaacatgatagaactgttcattctgcccaaattgatatagagatttaatgtaacttttattgaattacacaagattttttctctatacagacaagattattctaaaatgtgtatgaaaaaaacaaagaaagtaaaatagctaaaatgatttatttaattaataataaggtagaattttaatgagtctaaatgatttcaagactaactgtataggtattcaagactgcatagtattggtagaagagtagctcaatggaacagaataaaaattgcagaagtcgaaccataaaatatgcccaactattttttattattagacttatttcaaaaaaagaaattctaggtttataaaaaattgagtggaaagtacagaaaattcctatatagcctctcatcctacccagtttcccttataacatattgtttagtgtggtatatacgttacaattcatcagagatattggtctgtatattcttttctttttttcttttctttttttttttttttttgagatggaatcttgttcttttgtccaggctgagtgcagtggtgcaatctcggctcattgcaacctctgcctccagggttcaagcaattctcctgcctcagcctcccgagcagctgggattacaggcgcacatcaccatgcccggctaaaatttgtatttttttagtggagacggggtttcaccaagttgtccaggctggtcttgaactcctgaccttgtgatctgcccgcctcagcctcccaaagtgctgggattacaggcgtgagccaccatgccctgccggtctgtgtatttttttcatgttgtacacttaattagctttgctttcagggtgatgctggctttgtagaatgtgttagggagtattccctcatccttgattttttagaacagtttcagtaagattagtttcagttctcccatgcctgtttgaaataaactggctgggatccagctgtctggtcctgggctttcccccaccacccccaggcagatgtttaataactgattcaatttcactgttcattattgacctgttcaggatttctatttcttcctggttcaatcttaagaggctgtatgttttcagtaatttacccatttcttctagattttctactttgtgtgcatagagatgctcatagtagcctctgatgagcttttctgtttctctcctgttagttgcaatgacatctttatcattttttattgtgcctattttaatcttctctattttcttttttaatctagctagtattctatcaattttatcattttcaaagaagcaactttctgtttcattgatcatttgtattgtgttttttaaacctcaatttatatagttctgttaatttttgttatttattatcttctgctagctttaggtatggtttgttcttgtttttctagttgttttaggtgcagtgttaggttgtttacatgagatcttcttatctatttgatgcagacatcaacattataaactttactcttagcactgcttttgctgtatcccagaggttttggtatgttctgattctattttcattctttccaaaaattttttgatttttgcctgaatttcattttgacctaacaattattcaaaagcagattatttagtatttgtgtagttttaagggatcctctgggtgtcaatttatagtcttattcccctgtggttcgaataaggtacttaatattatttcaagttttaaaaatttattaagactttccttgtggcctagcacatggtcaatttttgagactatcccttgtgcaggcaagaagaatgtatatcctattgttctagggtagaaaattctgtaaatgtctgttaagtctagcatccaatttaaccagaatttcttttttgatcttctgcatcaatgacctgtctagtgctgtcagtggggtattgacattcactataattttattgggatctgtatttttttcttaggccttagacaaatactttgtagtatttgtcgtatcagtctgggtgctctcgtgttgaattcatctccttatcttatataatgatgttctttgtctttttaaactgttgttgatttgaagtgttttatctgatatatgcatagctattcctgctcacttttggtttttgtctgcatgaagtctctttttactcacctttatttggagtctgtaaatgtctttaccatttaggtaggtttcttctatgcagcatgtagttggatcttgttttgttatccattctgccagcctatattttttaagtggagcatttagtccatttatatttatggttagttttggtacatgaagttttgtccctgccataatgttagttattacttggttgctttgcagtctcagttgtgtaattgtttcatataacctgtgagttttacattttcatgtgtttttgtgatgatgagaatcatcctttcatttccacgtttagaacttctttgagcatttcttacaggacgagtctagtgttgatgaattcttagtgtttgcttaccttaaaaagactttatttctctttaattagtgaagattagtttagcagaatacaacattcttggctggcatttgttttctttaagaagactgaaaacaggaccccggtctcttctggcatataatgtttcagctgagaagtccactgttagtatgatgagatttccttcataggtgattagatgcttctctcttgccactgttagcactttttggttcatgtttactttggatactctgatgactatattccttggtgagattcttgcaatgtatccttcaggagttctctgagtttattgtatctgaatgtctagatctctagcaagaccagggaagttttcctgaattattgccttacctggtttttcatactttttactttttcttcttctcccttaagaatacctgcaaatcatatgtttggatgctttacatagtcccgtatttctcaaagtctttgtaaattctttttgctttatttttatctgactgtgttattctaaaagacctgtctaccacctataaaataatttttctgcttggacaagtctattgttgaagatttcaactctattttgtaaatccttcagtgaatttttaatttccaaaagttctgtttttgtttttttttaaaataatgtctgtctctttttatatcccgaattgtttttctgaattctttgtgttgcttttcaactttctcttagatatcatgggccttctttaaaagacaatattttgagttctttatctgatatttcaaaaagtacattttggttaatacacattgctagagagttaatgtggtcctttgggggtgttgaaatattctgggtttttttatactttcagaattgtttctctgatttcttctcatctggataagctatctctccatatttttaaattttctgcattttgatgggatttttcttcccttgaggatgtgactataatgtgtgttgtgcagaatatttggctttggttctgggttctttcagtggcaaagactctgtataagttccttgattatagatggcctttgtatggtgactttctcagatgctgggtgtagtaacaatgtactgggtatgaaagcaggctcactgtgtcctgtgaggccggcatgcagcggtatcaggaagcttatctcatttaccagtgttgtgcacttgggtcagcagattttcttttaggttgtgcagatcattctccaaggattgaaaagacaatcctttctccatcgaacttccttttaccatttgttaaagatcagttgactatatttgtatgagtctatttctgtgctctctactctgttccactgatctatgtgttcattctttatcaatatcacactgtaattttactgtaatcagtagtaacacaaattattttgacaaaggtgcaaaagtaattcaacaaattagcaagtggtgctggggcaattggacttacatgggcaaaaatatattcattcatctaagtttcataccttgtacagatattaagttgataaaagatttaaatgtaaaaataaaacttttttaaaaatatggggggattgggatctagtctgtggcaaagagtttttagacatcaaaagtaagatatgtaaaatgaaaaggtgataaattaaacttatcaaaattagaaaactttgctctgtgaaaaatttttttaaagagataaaaatataagccataagctcagtgaaaatatctggaaattacatatctgacaaaggattagtatctagatactatatacctatgtatacacatatcataattcaactgtgaaaaatcaaataattaagttaaaaatgggcaaaaatcatgagacatttcaccaaagaaaaacagatgggaacttagctcatgaaaagttgcttaagttcattagccaccagtaaaatgcaaattcagaccaatgatatctcattaaaaacaatgagatatcactaaacacttaacagaatgacttaaatagcaagcggtgacaataccaagtgcttgtgacaacatggagaacctggatcactcacacattgtagaatgtaaaatgaaacagtaatgctgaggaactatttggtgcaagaggcttagcttttactctatctgggctctcaacatgccttcctcactaagcttaatcatttctagctaacttaaaatgagagaaatgatactttttctttcacttgaacatagtggtcattgcagtgttatttgttggcttagtttcaatattgttgtgtctcagggaatagggaagtccaaggagagggagagagatgagggaattggctgattgatggggaggtcaggacacacacatttattgattaagtttgctctcttatatggatgcggtttatggcacctaaaacaattacaatagtaacgtcaaaaatcactgattatagatcaccataacagatataataagaatgaaaaagtttgaaatattgcaagaattactaaaatatgacagaggcaagaagtgagcacttgctgttagaaaattggtgcttatagaattgcttgatgcagggttgccataaaccttcaatttgtaaaaaaaaaaagaaatgcagtatctgcaaagcgaagtaaagcacaatacataagatctatctgtataaaaaataaacagtttaatttaaaaaatcttggggcaatattccatattaagatgtgcaaaggaaaattaaacagtctcaggatcccccaaacttcttatgcaaaaggaaaaaaggctgagtcttgcagtactcttttccaaacgaatatctgttactaatactatgtctcagccagatccctatggataggtaaaaggcctccagcatctgctgaaggactgcctccacaggtctttcagaaataaatcttttgctggctttccataaacaatcacatgccaattataacctttaggagctatctaattttagctcctaaaactccacactgatactgtcattacaagctcattttctcaggtggagaataaaggccagattcatttcccccacctacccagagatatctgcataattggtttttcctttactccgcttttcttttcaaacattcaccttgtcttatgtaaaatgtagttttactgggcactaactaaagtctcacagaaatgtaactatttgcctaacctccttccctacataccttccgcctccaactctaagggaagatataaatactaaatttcctgaaaacctctttggagaaacagccatacatgtgtctgtggcttgtctttttcctggatgcaccataagcaggcttaataaacctcagtgattaagagttatgcctcagtcactcattttagttgtcagatgccctcataggtcaaggttcctacaaaaaaaagtcaaaccagagagacagctggctttctttcccaagctcaatacttgaacacttaaagtggagaaacaaaacaacaacaacaaagaaatgtagaaaataatttaaaaattcttggcatgagaggcattattttgaacccttgtgcagggatgcagcttttccctgaagaaggaaatagccaggtgaggctgtgggaagacaacaaataaaggaactgtttaaagttctgcttttgcttctcccctgacattgcctcaggacaaacagttcctgatctttgcactggctgctactcaaagctctagtccagttaccgtcagaagtaaattcatgcctgataagaagtcttatagctatgaagatgagatttaaaaaaaaaatactttcaagcagttatttccaatacctccctattcaaattctccaagggctagtaaattataatttaaagaggttctcctaataaacttctcccatatttgcgggaattaggagtgtttttattgttctgtttatcttttggtctctggggctctctccccaagagctcatccagctccttcatcccaggaggtgactggagctcactagactggagactgcttttcttctgcatgtactgcctgacagtgtagccagtattctcatgggatataagctcacaaactaaaataataagtctttgaagagttcaaatatttcaaaagaaattaaacatgctttattaaagattctaatagagcacaagtactagaacaaaaggaccaagaatataaaattatccaaattaacatatgaaaagagacaagggaaaatattaggaataattaaggtatgaaagtttttaaaaatcaagctatattagttatgaaaaataaaataattgaaataggtaaactttaaataatttttaaaatatgaaaggtctcagactgaacaacccataataggtcaaagaggagcattaaggaaaagcacatacctatttgctatctgtggtgaatctgcacacatctacagcaatctcaattatttcctctgcagaaggaaaaaattcaaccaagggacataaggcagaatgaaagagtgaggtaaagtttagaataggagtgaaagttgattaaaaggctttagagtaggaatgaaaggaagtgaagtacacttggaagagggccaagcaggcaacttgagaaatcaactgtgtggtttgaactggagttttatacactggcgtgtgtattactccattttcacaatgctataaaaaaactacctgagactgggtaatttataaagaaaaaagacttaattgatttgcagttccacatggcttggaggcctcaggaacctgacaatcagggcagaagatgaagaggaagcaaggcatgtcttacacggctaccggagaaagagtgaggcagaaagtgccacatgctttcaaacaagatcttgtgagatctttactcactgtcactagcacagaaagggggaagtccatccccgtgatttaatcatttcctatgacaccccttcactgacacatggggattacaattcaagatgagatgtgggtggggacacagagccaaaccatatcattccacctctggaccattccaaatctcatgtccttctcacatttcaaaacacaatcacaccttcccaacagtccctcaaagtcttaactcattccaacattaacccaaaagtctaagtccaaagtctcatctgagacaaggcaaatcccttccacctatgagcctataaaattaaaagcaagttcattatttccaagataaaatgggggtgcaggcattgggtaaatgttcccattccaaatggaagaaattggccaaaacaaaggggccacaggtcccatgcaagtctgaaacccagtggggcactcattaaatcttaaagctctaaaatgatctcctttgactccatgtctcacatccttgtcaagatgatacaagggatagatcccaaggtcttggacacctctgcccctgtggctctgcagggtataccctcacagctgctttcacaagctgtcattgagtacctgctgcttttccaggcccatggtgtaagctgtcagtggatctaccattctgtggtctggagtatggtggccctcttctcacagctccaccaggcagtgtcccgggggacctctgtgtgggggctccaaccccacacttccccactgcactgccctagtggagattctccatgagggctctgcccctgcatcagacttctgctgagacatacaggcattttcatacatcctctgaaatctaggcagagcctcccaaactcttaccttctgtgcacctgcaggcccaacaacacgtggaagatgccaaggcttggggcttgcaccctctgaagcagtggcctgagctgtaccttgaccccttttagccatggctggagctggagctggaatggctgggacacaagacaccatgtcctaaggctgcacagaacagcgagcccctgtgtccagtctacaaaaccatttttccctcctaggcctccaggtctttgatgggaggagttgccatgaagatctctgaaatgccttggagacattttcctcactgtcttaaggattaacattcagttcccctttacttatgcaaatttctgaaaacactggtttgaattcctccccagtaaatgggtttttcttttctaccacatggtcccagcaaattttccaaacttacatgctctgctttccttttaaacataagttccaatttcagatcatctctttgtgaacacagatgactatacgtagttaggagcaaccaggccactttttaacaatgctccttagaaatttcttccaccagataccctaaatcctctctttgaagttcaaagttccacagatctctaggacagggagaaaatgccaccagtctctttgctaaagcgtagcaaatgttaccctactctagttcccaatatttgtgttgtctccatctgagaccacctcagcttggatttcattgtccatatcactattagcattttgatcaaaaccagttaacaagtctccacgaagttccaaactttcccacatcttactgtcctcttctgagccttctaaactgttccaacttctgcatgttatccagttccaaagtcgcttccacagttttagatatctttatagcagtgccccatgcctggtaccagttttctgtattcttctgttttcaaactactataaaaaactacccaagactgggtaatttataaagaaaaggggtttaattgactcacagctctgcatggctggagagaaaggaaacttagaatcatggaggaaggcaaagagaaagcaaggcctgtcttacatggcagcagaagagagagagagagagcaaagaaagccacacacatttaaaccatcagatctcatgagaactcactcactatcatgagaacagcaaagcagaagtctgccccccatggttcaatcacctcctatcaggcccctccccagacacattgggattacaattcaagatgagatttgaatagggacacaaagccaaaccatatcagcatgcttctggggtcttatattccttatcccctgattctttccttagggtgggctgtctgtatgtacagtggcctgctagctcttgggaggggagcatgcacagtgtttttactggaattgtatgcattctcacatgaggtatttttcccttaccagtcaaatgtccctagaaggtcatatgccagttaaactccaccatttttgtctcttaatgcacatgcttgaggacatttgcccaactcccaacttctgagatcttattggaaagctgctgatcaccagtttcaggtgtttctgtttattggaagactgcttttccctggcactggttgtgaccgattattatattagagagaaagttaacaactgcctgaccatcacctaatggttgcctgatatccttgggtgagggtagggggagtgggtggagggggataggggaatccctctcctgctctgctcatgtcctactagctacctgctgtaatatatccatgctaaaatggtatgtttgaatattaaaacaaagggaaattttttgaaagcttacagaaacacatgattacatataaaagatcaagaattggattgatggcgttttttaaatataaaaatgggaatgatacgataacaaaatactctcaaagtattgatgaagagtaaagaccagaatgttataaatagacaaactcttggtaagtctttaatatcaatagtcatttacttttatccagaaatcaaacatgaggtttctggagtggtgatcaaagttattatttaaagcaataactgtacttgtttccctgtgcttcatactccacaaattatgtgatgagagccagatattatgccatacgtgtggggatttatacttcaggagaggaaaactgaaattctaaatttggaaatttgtttggattagctaatcaacgggcaccttctcttctaagagaaggagataagtctaatctccacaatgtaaacaacttcttgagaagagaaatgaaaactccctgggttcctaatcttttgactgtaagtaagtatctctaggaagaagataagacatcatttcaatttataattctgaaaatttatctatggttctgggctttatctccctttaaaatttaaacacttatcttcaagcaggtaaatctacccagagttctttcacaatctattcaatcatcatttagctttcaagatttctcctttaacctagatttctgttttcttcactcaaaaagccctaagtatacacacaaaaatgtaaatattcacttcctgaagattgtcactcaaatatagggatgtgattaaaatattctcagactttcaatgccacagatatttgccacactaaaacctattctgaaaacagttctagaaaaagtacacaggttaaaaaaatccaggaaatattataagatatatatgaagaaacaaggatcaaaagcttgttaaaactatgtcacttaaaaatttttctaacaaaaaaagaggaaatataataataataaccaaaaaataaaagtctggagaatctcagcctgatgaagaagggtggaaggtgatgcatatgaaccgaaagatgtgagaactagctaaaattcttgccatttaaaacaagaacaagtataagttaaaaaaaataaacttagaaacagtagaaaaaactaaaacaagaaattaaagtgacagaaacagatacaaattcatcactaaccacaataaatgtaaatggattaaacaatacatttacagaatggataaagacatgaaataataaagacaatgcagcagaacatccaaagtatgagattgaaggtaagtaaaaagacataggcaaatgccaaaagaaagtatataggactaatttaatatctgataaaatgggtgtggatgtataaagtacagaaaccacctttgtaaaattatgataataagagaaatctgacatagttgactccatcttgcttgtaacctccaagcttgatcattcctgaccataggacaaactaatcttgggaagaacttatagtttaaccttaaagcaaggatgatgatagtcctttctgcaactaaactgcctttggaaaactaatgaaaagctacaggattagaattatgagagaggcctgaatgctgctaaaatgtaagcatagttaaatgataaccagccattttcctggaggttgcaaaatttgtaacttccccagatggttctatagatactatcactattgtagaatctaagattggttgtttgagaagtttttgcagacttttatattctgagaaccccacgtggacccatgactcatgatttaaccagccctgtggtccccaacccagagatagattcagcacatgagcatcattttccacacccttataatgacatccccaatcagtaggcagcacccaacccctagtccctttcccaccaaactgttcttgaaaaatcctaatcactgactctttggggagactgatttgagtgataactacattattcatgtagccggccttgtgtcaattaaagcctttctttactgcaacgccatggtctcagtgaagtgtttttttgtctttctgttcagcaggcaggaagaatccattgagcagttatagtacttattaaagatgaactatcattatctcctgaaaaatgtttcaacaaactaagatatagcaattttaaacatgtatgcacctaattttaaaatgcacttaatatttatttatttgtttatttatttatttatttatttatttattgtctgagacagagtctcattctgttgcccaggctggagtgcagtggcacgatctcagctcactgcaacctctgcctaccaggttcaagctattctcctgcctcagcctcctgagtggctgggattacaggtgcgcaccaccatgcccaggtaatttttgaatttttagtagagacagggtttagctatgttggccaggctggtctcaaactcctgacctcaagtgatctgcccaccttggcctccaaagttataggattacaggcgtgagccactgtgcccagcctaagatacacttaatttagaattaagggagaaactgataaatccactgtcatggatttcaacatatctcaattgataggttaagtacacaaaataatagaaaaaaatactgatctgaacacaattaacaaatttaaactagtgcacatagatgtagagttttacagccattaatcaaagaatgtatattttttctcaagcatatatggaagataaattatgatattgtatcataaaggaaataaagacaacacatttcaaaagtaccatagatactatacagatcttgatatctaatgacaatacaactgaagtaatttttttcaagatttaaaaatttttctttatatttgcaaattttaaacaaaaccctgttgaagaattcatgatgaataatgaaggagcaagataaataaataatttctagatttataagacaataaaggataatgaaaagcttacagagtaacacctaagagatgtggtcaacatgggctcaagtggtcctttgagagagatttatagccttaaatatctgtattagaaaagaaaaatctttaaaatcaattgtgctaataaatattttttttcttttttttttttattatactttaagttttagggtacatgtgcacattgtgcaggttagttacatatgtatacatgtgccgtgctggtgcgctgcacccactaactcgtcatctagcattagttatatctcccaatgctatccctcccccctcccaccaccccacaacagtccccagagtgtgatattccccttcctgtgtccatgtgatctcattgttcaattcccacctatgagtgagaatatgcggtgtttggttttttgttcttgtgatagtttactgagaatgatgatttccaatttcatccatgtccctacaaaggacgtgaactcatccttttttatggctgcatagtattccatggtgtatatgtgccacattttcttaatccagtctatcattgttggacatttgggttggttccaagtctttgctattgtgaataatgccgcaataaacatacgtgtgcatgtgtctttatagcagcatgatttatagtcatttgggtatatacccagtaatgggatggctgggtcaaatggtatttctagttctagatccctgaggaatcgccacactgacttccacaatggttgaactagtttacagtcccaccaacagtgtaaaagtgttcctgtttctccacatcctctccagcacctgttgtttcctgactttttaatgattgccattctaactggtgtgagatggtatctcacagtggttttgatttgcatttctctgatggccagtgatgatgagcattttttcatgtgttttttggctgcataaatgtcttcttttgagaagtgtctgtccatgtccttcgcccactttttgctggggttgtttgtttttttcttgtaaatttgtttgagttcattgtagattgtggatattatccctttgtcagatgagtaggttgtgaaaattttctcccattttgtaggctgcctgttcactctgatggtagtttcttttgctgtgcagaagctctttattttagttagatcccatttgtcagttttgtcttttgttgccattgcttttggtgttttggacatgaagtccttgcccatgcctatgtcctgaatggtaatgcctaggttttcttctagggtttttatggttttaggtctaacgtttaaatctttaatccatcttgaattgatttttgtataaggtgtaaggaagggatccagtttcagctttctacatatggctagccagctttcccagcaccatttattaaatagggaatcctttccccattgcttgtttttctcaggtttgtcaaagatcagatagttgtaggtatgtggcgttatttctgagggctctgttctgttccattgatctatatctctgttttggtaccagtaccatgctgttttggttactgtagccttgtagtatagtttgaagtcaggtagtgtgatgcctccagctttgttcttttggcttaggattgacttggcgatgcgggctcttttttggttccatatgaactttaaagtagttttttccaattctgtgaagaaagttattggtagcttgatggggatggcattgaatctgtaaattaccttgggcagtatggccattttcacgatattgattcttcctacccatgagcatggaatgttcttccatttgtttgtatcctcttttatttctttgagcagtggtttgtagttgtccttgaagaggtccttcacatcccttgtaagttggattcctaggtattttattctctttgaagcaattgtgaatgggagttcactcatgatttggctctccgtttgtgtgttgttggtgtataagaatgcttgtgatttttgtacattgattttgtatcctgagactttgctgaagttgcctatcagcttaaggagattttgggctgagacaatggggttttctagatatacaatcatgtcatctgcaaacagggacaatttaacttcctcttttcctaattgaataccctttatttccttctcctgcctaattgccctggccagaacttccaacactatgttgaataggagtggtgagagagggcatccctgtcttgtgccagttttcaaagggaatgcttccagtttttgcccattcagtatgatattggctgtgggtttgtcatagataggtcttatcattttgaaatacgtcccagcaatacctaatttattgagagtttttagcatgaagggttgttgaattttgtcaaaggctttttctgcatctattgagataatcatgtggtttttgtctttggctctgtttatatgctggattacgtttattgatttgcgtatattgaaccagccttgcatcccagggatgaagcccacttgatcatggtggataagctttttgatgtgctgctggattcggtttgccagtattttattgaggatttttgcatcaatgttcatcaaggatattggtctaaaattctctttttttgttgtgtctctgcccggctttggtgtcagaatgatgctggcctcataaaatgagttagggaggattccctcttgttctattgattggaatagtttcagaaggaatggtaccagttcctccttgtacctctggtagaattcggctgtgaatccacctggtcctggactctttttggttggcaaactattgattattgccacaatttcagatcctgttattggtctattcagagatgcaacttcttcctggtttagtcttgggagagtgtatgtgttgaggaatttatccatttcttctagattttccagtttatttgcgtagaggtgtttgtagtattctctgatggtagtttgtatttctgtgggatcggtggtgatatcccctttatcattttttattgtgtctatttgattcttctctctttttttctttattagtcttgttagcagtctatcaattttgttgatcctttcaaaaaaccagctcctggattcattgattttttgaatggttttttgtgtctctatttccttcagttctgctctgattttagttatatcttgccttctgctagcttttgaatgtgtttgctcttgcttttctagttcttttaattgtgatgttagggtgtcaattttggatctttcctgctttctcttgtgggtatttagtgctataaatttccctctacacactgctttgaatgtgtcccagagattctggtatgtcgtgtctttgttctcgttggtttcaaagaacatctttatttctgccttcatttcgttatgtaccagtagtcattcaggagcaggttgttcagtttccatgtagttgagcggctttgagtgagattcttaatcctgagttctagtttgattgcactgtggtctgagagatagtttgttataatttctgttcttttacatttgctgaggagagctttacttccaactatgtggtcaattttggaataggtgtggtgtggtgctgaaaaaaatatatattctgttgatttggggtggagagttctgtagatgtctattaggtccgcttggtgcagagctgagttcaattcctggatatccttgttgactttctgtctcgttgatctgtctaatgttgacagtggggtgttaaagtctcccattattaatgtgtgggagtctaagtctctttgtaggtcactcaggacttgctttatgaatctgggtgctcctgtattgggtgcatatatatttaggatagttagctcttcttgtttgaattgatccctttaccattatgtaatggccttctttgtctcttttgatctttgttggtttaaagtctgttttatcagagactaggattgcaacccctgcctttttttgttttccatttgcttggtagatcttcctccatccttttattttgagcctatgtgtgtctctgcatgtgagatgggtttcctgaatacagcacactgatgggtcttgactctttatccaatttgccagtctgtgtcttttaattggagaatttagtccatttacatttaaagttaatattgttgcatgtgaatttgatcctgtcattatgatgttagctggtgattttgctcgttagttgacgcagtttcttcctagtcttgatggtctttacattttggcatgattttgcagcagctggtaccgtttgttcctttccatgtttagcgcttccttcaggagctcttttagggcaggcctggtggtgacaaaatctctcagcatttgcttgtctgtaaagtatttaatttctccttcacttatgaagcttagtttggctggatatgaaattctgggttgaaaattcttttctttaagaatgttgaatattggcccccactctcttctggcttgtagggtttctgccaagagatccgctgttagtctgatgggcttccctttgagggtaacccgacctttctctctggctgcccttaacattttttccttcatttcaactttggtgaatctgacaattatgtgtcttggagttgctcttcttgaggagaatctttgtggcgttctctgtatttcctgaatctgaacattggcctgccttgctagattggggaagttctcctggataatatcctgcagagtgttttccaacttggttccattctccccatcactttcaggtacaccaatcagacgtagatttggtcttttcacatagtcgcatatttcttggaggctttgctcatttcttttcattcttttttctctaaacttcccttctcgcttcatttcattcatttcatcttccattgctgataccctttcttccagttgatcgcatcggctcctgaggcttctgcattcttcacgtagttctcgagccttggttttcagctccatcagctcctttaagcacttctctgtattggttattctagttatatattcttctaaatttttttcaaagttttcaacttctttgcctttggtttgaatgtcctcccgtagctcagagtaatttgatcgtctgaagccttcttctctcagctcgtcaaagtcattctccatccagctttgttccgttgctggtgaggaactgcgttcctttggaggaggagaggcgctctgcgttttagagtttccagtttttctgttctgttttttccccatctttgtggttttatctacttttggtctttgatgatggtgatgtacagatgggttttcagtgtgtatgtcctttctgtttgttagttttccttctaacagacaggaccctcagctgcaggtctgttggaataccctgccgtgtgaggtgtcagtgttcccctgctgcggggtgcctcccagttaggctgctcgggggtcaggggtcagggacccacttgaggaggcagtctgccggttctcagatctccagctgcgtgctgggagaaccactgctctcttcaaagctgtcagacagggacatttaagtctgcagaggttactgctgtctttttgtttgtctgtgccctgcccccagcggtggagcctacagtggcaggcaggcccccttgaactgtggtgggctccaccctgttcgagcttcccggctgctttgtttacctaagcaagcctgggcaatggcgggcgcccctcccccagcctcgctgccgccttgcagtttgatctcagactgctgtgctagcaatcagtgagattctgtgggcgtaggaccctccgagccaggtgtgggatatagtctcgtggtgcgccgttttttaagccggtctgaaaagcgcaatattcgggtgggagtgacccgattttccaggtgcgtccgtcacccctttctttgactcagaaagggaactccctgaccccttgcacttcccaggtgaggcaatgcctcgccctgcttcggctcgcacacggtgtgcgcacccactggcctgcgcccactgtctggcactccctagtgagatgaacctggtacctcagatggaaatgcagaaatcacccgtcttctgcgtcgctcacgctgggagctgtagacgggagctgttcctattcggccatcttggctcctccccgagaatcagctaataaatatttttagaaaatgaataatgcagtgaaaatgggaaaaataataaaaataagagttgtgattaatgcaatagaaaggtgctgttttatttaactagaatatgattataaagcaaacatatcaaatagaaataaacaaccatctggagcagagaacggaaagagatttttgcttaacctttctcattctcagaaaaattaattccattttccccttctccttcacgtcagctcttccctctgctttaaactatagggtctgctgccatgcaaaaggtgagtaccatcctatgacaaagagtggcaagcctagaaagtcaaaggaacccatccacagagcacccacagacatcctgttgggaaccactgactgtgtgggtttaatttgctcgtacatactgcctcatagagagaaaaataaaatttggagaaatcagaagttattaaacacaagtactcaaaaggattggcacagactggtgctgagcagtctagcaaaggaggtcatgatgtacaccagcttccttcagcctttgccagcagtatatgctcatctcatcattaagcaaggctcttaaaatccccaaagagcagacctctttttgtggagattaaataaagattttagcttgaatttctatatctttaacttgtgttaaatctaaacccttgcagacttccttattttccacccaattaatgcataacatggttcagtagctctgactttaccctggtagcctgattatggtaatgtgaacattggctcataccactgttcctaagagtgctgtgctgtgttggagccaaacatcagaaacaatctctcattgttgtgggatggagggtggagatatatttgcatgtgtgtagatatatatattgatatgtgtgtgtgtgtgtgtgtgtgtgtgtacgtatacataaaacgatggattttgacccaggaagaggaagagtggtggctgaagcaccaggaactcatgtacttgttctttgtacacaccaggagaatcagggttgaaatactcttcctctctcctgacagtctggtgttatttaggattaaagtgctctagttcagtggtccccaaacttgctcatcactaagagtcacctacgtgctagttaaaactatacattactgaaactttctctagagcttctgttttgtttggtcggggatatagcctaggtttctgtatttttaacttgtgtacctagggcaactttatgattagacatgtttggaaaacattgctctacctagttccaaggtctaacaattttaaactgaatgttcacatagccttttgggattattcttattgttgtccataagacttacctgacttctccaataaccccaggagaagaatgtggtattcattagtttgccatatttacttagtatacctctatttcttaacctctttaagcctggttttcccacttgaaacatggagagaatagtaataataatacctatctcagagagatttttacagaatgcaataaactaatgcttataaaacacttaacataggacctagaacaaagtaaggctgcaataacatcagctatgattattattatttcataccacacactttttacttgcctaatgtgataaatcatttggaaaagtgttgccattattctcttctctgtaccagggctctatgccatgtggctttgtagcaactcccatcaggagatgaagattacttcccttacacttgaaactgggatggttctgtcaattgcctgaaaaattgaatgtgatgacaaaagcaaaattgtgctagttttgggcctaggcttcaagaggccttgtgtacttttactctatgacaaggtcattctagcctgctaaaagatgagagacaatgagggcaaggccagtgagccagctgtccccgccctggtcccagagatgtagtgaagcctagccaagatcaacaaagtgctactcaacctacagctgactagaggcaaatgagtgaacccagcagacaacagaaaacccacccagttgacccaagaactcatgactaataataagaggtgattgtgctaaggtactaagttttggggtaaatttggtacacaggcatagatctggtacatcgattatgtgccaattactaagttacatattagagatgcatagggaaataaggcacagtcctggttctcaaaaaccaaaagcatgtttttgcaaaagacaagtaaacacaattttagaatacagttatgcaaggctcaattatatatatttttttatttcattcactcaaaaaataattttacaatttctgatatttgtcatgcactgttctagacacttgaggtatatcagtgatatggtttggctctgtctcctcacccaaatctcatgttgaattgtaatccccacgtgttgaaggaggggcctggtgggaggtgattgaatcatggggatggagttccccttgctgttcacatgatagagttctcatgagatctggttgtttgaaagtgtgtagcacttccccctttgctttctttctcctgctgccatgtgaagacgtgcttgcttccccttcgctcttctgctatgattctaagtttcctgaggcctcccagccatgcttcctgtacaccctgaggaattgtgagtcaattaaacctcttttcttcataaattatccagcctcaggtagttctttatagcagtgtgagaatggattaatacaattggtaaccaaatcaaacaaaaatcccttccccatagaaaaaaaaatgttataagtaagtatattaacaggatattagaaggtgacaagttctgtttaaaaaaaattcaggaaacataaaaccggtaagaaggatcaggaatatgggacacagtgggtggaaatcagattgcagtattaaatggggtgtctggtaaggctttgttgaggaaagttgagcaaaaacttgaaaaagatgagaaagttaaacaatctttccaaagagatcaatgagataaggtgaaggccctaaggtagaaaagtgtctacaatttttgggtaacagaaactaggccagtgtaactaaagcagaaagcacaaagtaggccatacaaactagcctgtaagaatacttttttaaaataaaagctcctgaaggatgtgacaggagttcagtgttgaagcaagcacaggagttagcagggatagtggagaaaggcacccaggatgtggtgggagggagatagatgaatgagaactccaaggagaagaccagaacacatgcagagaaactaagacaatgttcatggttagtgtgaactctcggggaattggaagtatttcataggattggagaacaaaagagtgatacaaaattatttttaaaagcaggcggaccatatactggaagacattgaatggaaggctaaggaggttcagttttacctggatgtcagtggagaagcattgaagagttgaagcaagagagaagtgattttattagactagctttgaaagatcattcagtttagcatggaaaatgagttggaaaggagtgaagaaacaagtcggaagactacttagaatctttactgatggccctttcaagaaatgaggatagagaggagggtgtggagtcaagcaatgtaaaaaatgtgacaggatagggtgaatgggactggggcagtggaacaactgtagtacttcaagttttagatcacaatcacttcagggtctttaggagatgagatattttaatggccaatgcaaagagtaacatcatttatttatgcattcatttccttaaatatttaatcaatgcctaggatgtgtctaggtaatattaaacagtaggaatataaagagtagtgatgcagttacatcaccaaggactacacagtcctaacactggctcatcaccccctaaaactaacactggctcatcacctccaaaacaactgccagtgagtggttattgtatgcaaagcaggtattgagtctttacaaggatcgttttaatgaatcatcacaatggcattttgaagtaatactattatccccattgtacagaagaagatattttactttgagagattgacttggccaaaatcacacatttagtaagtggcagagctaatacctgaatctaggactatctgtcgcagtcccatgctacatggaaacccagacctacgaatcagtaaatgtattaaaggaaataatcaattttccctgacagagtggtttgaaagccttcaaagtggtgattcttgatttgagtttttacaggtaagcagatttcctccaggcagccagggaggaaaggagagtgaaagggcacaagcagcgtgttctgcggaagggcagctgtgctgcatcagctccacctgtttctccatatttactctaattctctttcacctcctctctgccccagaaggctgactgctatggactgcacaactttagcttctttgggggctgactgaatttgactggctgtagattggaatgtgggaatcaggaaaaatcagaattaatattttcctggctccctccatgcaaggccacaagttgacaattgctgcgttcttgtatcaaaggctacatctgctggacattcctcccctcagttctcttcattcaaaactacagttctcttcacttctagccactgcgtcttcctctcaccttcaggcctgcaggcctgaatggctccacatgttgccagggcttgaatgttccatcatccctctgagttgcttaactctgccccgcaccttttggaaatagcgtccccctcagtttcattctctctgcctctgcttctctctctcccgggcatgtacacacattcccttaactaatagctttattgagatataattcacatagcatatcaatttattcatttatcgtacacaattcaaagatttttagtacagagtcgtgcaaccatcaccacagtcagttttagaatattcccatcacccaaaatggaaactttgtagtgtttaacagtcgtcttcccgttccaacccccagccctaaacaaccactcatctactttctatctgcatagatttgattaatgtgacatttcatataaatgaaatcataaaatgtatggttcttttgggactggcttctttcacttaacataatgcttttaaggttcatctatgttgtagcatatatcagtattttatttctatttattgctgaataatattttggggctataccacattttatttatcaattaattgatgaacagttcaatcatttccaatttttgaccatcatgaataatgtatgaaaatctgtgtacaaggtttcacatgaacctctatgtttatttgctgagtacatatctatgaccataattactgggttatatgacactctatgtttaatcttttgagaaactaccagactgtttcacaaagtgactgcaccattttacattcccatcagcaatatgtgaagatcctaattttccatgtccttggcaacagttattagctgtctttttgttttcttataatcctctaaataggtacgcagtggtatctcattgaggtttggctttgcagtcttctgatggctaataatactgaatatccttttatgtaattattgactattcatttttctgttttggagaaatatctattcagatcctttgctcttgttatatctctcaatctcttaagcaattcatttgtctcctgtgtttcttgttaggacccccattgatacatattacaaagactatccagatttatagaacatgccttacttcaaggtgcacacattcagcaaaagatttagggcaagccacttgtgctagttgtgaaaaacaaaaagaagaaaatcatttttatattactacactgactttggtgatttcttttgaattgaggctgtatctcaacatgataccttaatcatctagtttttaattgaatcatttactagtcaaccatcctaaaaacacagactagttacctttcagtccaggtcacagaaagtggaattttagggctccagttttgtcagtgcaaactttcccaatgagaaaaagtcctgacagttgtaacacttaaatttttaaaaagctgcaagtgacattgatggtggcttcttctccttatcaaaatgacttagactttggtaagacccagcagctccaataacgttagggtttgggaccacacagatctgggtttgtatatcttctgtataatttaccatttgcttaactttagacaagttacttgagccctttaaacctgttttcttgtctgtaaaattagggtaagtgtaccactatatataaaatagttgtgttatgtaagtaaaataatgcaaattagacacctggaaagagtaatatttaataattatttctttttccacttgtccttacagtgctttttcatgttaatctggttctgaaaagtatccctttccccaataatgctaagtacatgataccagactatgcagttacgttataaatgatacatttaatctctgttttaggtgaacccatttaattatatgcattattatttaaaaattctaaaatatattgaatctctcactccttttttttcccaacaacagttaataagacaaagtgttagcctcatagtatttttgttctagttatgaaaacagacaaactatttattcatttataaaattgtaggccaaaaaatagaattgtgtttagtgtctgtctaccaaaccataagtttcagaaaccttataacaacctatagcattgtaatttatctataacatgaattggatcacaagaatgggaaaagttgcattatattctctatttatgattgtaagctcattaatatcacatattgacaaaatgccaagggaaacagaatagtttcctttttaactaactccaagagctgatgaattatgaatatgaagtgaagggcctatctcataaaactaatgctatatctcaaggaagccagagaaaagctctgacctttaggaacacaatgaatttatagaaaaccagtcctccaggcatccaccctgaaaagtgcactcttatctacaaaccacagagagaagctacactcttaactcaaataatagccacgtctccctcctgaaaattgtggagctattcttggactacaaaagcatccaattgtgagaagagcagcagaggaagctactaaggcctttagattggtccctgcaagtagagaatttttttttcccctgagtgtaaatggaatatcaaacgagcacattttaaacatacaggattttggcaattgtgaagttttgttctggatgctcttgtccttaaattatattataatcatattagtaaagtgagccagtttgtactcaataccatactttattctttcttgccagtccttactaaattcagcctacgaaatattctttcctgcctcttgattaaaactcaagtaaattccatagcttttccaatcactcgtctttttttttttaccgtcttatttacatttttaaacctcacttccgccccagcattgcgtattctttgtgccatattttcctgccttttaataaataattcactgattttatttatctcctatcttccttcactggtaagttccttgagggtaaggaccttttctttttctgtgtagtgtatgtatgtgtgtatgtgtgtgtttgtactaatttattctttgaacctgaaacagtggctagtacactggaggcactcaagaaatatttgttgaatggaaaagtgaattagtgtattagtctgttcttgcttgctataaagaaatacctgagactgtgtaatttacaaagaaaatagatttaattggttcacagtttcacaggctgtacaggaagattggtgggggaggcttcatgaagcttttacttacagcaaaaggcaaagcgggagagggagtcttaccatggccagcgcaggaggaaaagagaaagtgggcaggggcttcacacttttaaacaaccagatctccagagaacagcactagagggatggtgctacgccattagaaactacccccatgatccagtcacctccctcaaggccccacctccaacactggggattacaattcaaaatgagatttggtggggacacagatccaaaacatatcaattagaagtctaaattctcatctagttaagacgtttctcttccctcatcctggcctcaccttaagcaggacactgtaatgcaaacgaaaggaaggtgtaggcagcttctctgtttttcactccctttcttggtctactaatcagctgctacttataactgcaagaggctgatgcagaagcaggatgtgaggtaagagaatacaaaattacttatggctgtaatttttcatcaaggtcaccttcataacaactgtgacagattcagtgtttgttaggttcctttgtggagaatttttgtgagttcttagaagactccacattgccgagctcctctcactgcctgatgtaggtggatagcttgactggtaggctgcctgtgacatgacttaatttctgcatctaactgttttctttgcagtgtctccgattaaaataatatatccttattataaaaagtggtatagttatataacaaaggattataaaggcaaaataaaaccctttcttttatcccacacctcaaactccaccaggtaatcaatgttaataacattttcccacaactttctccttgtttgtatatatgtagacacctgtacatgcaaatatgggatgcagttgtgtatatgtttattgttacttagttaaaactatgttacttagttacttagttaaaaactgttacttagttactatgttacttagttaactatgttacttagtttaactatgttacttagttataactgttcaatacattgacaacatatcatgatcaccattttttctaatgcccttattcagatacaatcaggatattgaacaagtatgattaagatatacataatcaaacaaactttgctttttgtctcttgtttcacactttaacatttatttaaggagtttaatctttccttgctcctgggcattgtgaattcagaaaatctgagacaggtctcagttaattaattaattaattattattattattagagacaaagtttgctcttgttgcccaggctggaacgagattttgcaatggcgaaatctcggctcactgcaacctctgcctcctgggttcaagcgattctcctgcctcagcctcccaagcctgggattacaggcatgtgccaccatgcccaactaatttttttatttttagtagagacggggtttcaccatgttggtcaggctggtcttgatctccagacctcaggtgatccacctgccttggcctctcaaagcgctgggatttcaggcgtgagccaccacacctggccaggtctcagttaatttagaaagtttattttgccaaggttgagaacaggacatgcccatgtcacagcctcaggaagtcctgatgacatgtgcccaaggtggtcagggcacagcttggttttatacagtttagggagacatgagacatcaatcaatatatgtaagaagtacattggttcggtctggaaaggccggacaacttgaagcaaaggcaggaagactaaagggaggagggaccatccaagtcacagataggtgagacacaaacaattacattcttttgagattctgattagcttttccaaaggaggcaaatcagatatgcatctatctcagtgagcagaggggtgactgactttaaatagaatgggaggcaggtttgccctaagctgtttccagcttgagttttcttagtgactttggggacccaagatattttcctttcacagcatgaacttcaggtcactttaagtgtctgaaatgaaaactcaactagacatacataacattcattgccagatattcagatttgattcaacattaaaatcttctcccctttccctgttaaaatctactttatttatttatttatttatttatttattgtaagttttgtttagacacaattactgcacatcatgtgagaaaaatattcaacttcacttcctttcatattgatgacccttgtgccaacagcatctattgaataaactctttacccttcttgctcaaatgaagtaacatttttacccatttgtacatattacattttcaaatatataaggttgatttacaggtttttctgttctttgcaattgacttgtttattctcatgttaatattatagtgattaaaagtgactggtatatggcccaacaccagtaagacaagacttcttccctcactattcctctttttcatgctttccctggtttatctctggcattttgacttcttcattacatagctggatccaattctctccaacacccaccatctggctggcattttattaataaattgaattgcattacatttatatattaatttagggatgtgtgatatttttatgacatcaaatattcttatttaaaaacatgaaatgctttttcaattatttagatcttgttttattttcatcactaatattttacagttttatttttataggtctgacatgtttcttattaaatatactcctaggctttatatggtttttattgctagagtgaatgttattttcatttctacttctagcagtttatgcctaagatagagaaaacctatttatttttgtataccatacttaacgttctaacagccacctatgcacttcttattaatcctggaagtttctgtgcacctctttactgtcacacaatcacattattggtcaaaaaaagtaatgataaaataacttaactcttccttatacattttttaaaaattaacattttgtttgttagttcctttgaggcaatggtaatagcaggcattcctgctgactggtttataattttcattgaaatagttttaggtttgctgtttgaatgatttaatgttaatttttggtaaaaagtctttttaaaaaaatattttatttctttatttatttttacactgggttatcagaccgtctaatttttgttgttgttgttgtttgtttgtttgaggcagagtctcattttgttgcccaggctggagctggagtgcagtagtgcaatctcagctcactgcaacctccgattcctgggttcaagtgattctcctgcctcagcatcctgagcaggggactacaggcgtgtactaccatgcccagctaatttttttatttttagtagagatgaagttttgccatgtcggccaggctggtcttgaactcctggcctcaagcagtccatccaccttggcccccaaaagtgctaggattacaggcatgagtcaccgcaccagccaggtaaagtatttttacaatatttaagtgacattctatttttatcagtgttttcattaagaatgacaggtaaattttatcagatgcttttttagcatctactgttatgatcacataatatttctctcttagtttgtggatataataaattacattaagagatttcatagtaattgtgccacccttgcattcctggaataagccttttattgctcatcgtgcagcactattttgatatattgctggagtctctttgctaatattcacttagaatttgtgcttctatattaaatagtaagattaatgtatgtgttgtgggatcagtttttgactttaaagttattctgatttaataaaattttttggtgatgttgagacctttttatgggttggaataaattaaacactaataggagcatatattaattaaactttagatagaatacagttgtgaagccacttgatctggatcctcttttattaacatatctgtaatgacattttattttttctttcttttttttttttttttgagacgttgtctcgctctgtcgcccaggttggagtgcagtggcgcgatctaggctcactgcaaactccgcctcccgggttcctgccattctcctgcctcagcctcctgaggagagtagctgggactacaggcacccaccaccatgcccggctaattttttttgtattttttagtacagatggggtttcaccgtgttagccagaatggtcttgatctcctgaccttgtgatccacctgccttggcctcccaaagtgctgggattacaggtgtgagccaccacgcccggcctgtaatgacattttcaatcttttctatgttaattaatatatttgttgtaagttaaatcttactaagaaattattttctctaagttttcaaatttattttaccttatcctgttttgtcattcttattatttttctgttttattaactttaggttttattttattaatttcctcttcctcccttcttttggtatattatattgtactttatctcattaaaattttaaggtgggtatccagacagaaatttacctttctatttatctgcttagtgcctttggcaccactcttatatttagcaagtttctaaatttaaaagacacttcagattagaaattgaaattataatttgtttgtctaggctcctttcctgcaagggtgcaggcagctatactgtagatgacatagcacacagattagaataatctatctatatgagaatttagcagctcatgatgtggtgccccagtatggggaggtggttggtgtgtgtgtctagtggcccctgaatatgggagccctgtaagagaagtggttggggtggggacttagcgaactgcccaaagaaaggaaatgagagttttaaatcacaacttcaaaactgggttcagatagcacttgtaaagtacattataccagaggtatcagctttttgacacagcagtgacaggtggaagatttggggctcaaacttgggtgcttcctcttggcagagtgagcagggtttcataggaggaacccagtgctgtaagtttggaggcgtgtgtcctccaaacttgattctctggatctcctggagattctcagacatactgtatttgtagtcaggggtctacaaagaaatggagccaatggaatatatacgtacgaaattggctcacttggctacggattagatgaagtcccacaatctgcagggtggattggaaatgtgaagtccccaggaggtcagatggtatcatctcatacatcatacaaagggttagcaggcttgagaccgaggtagagtaatgttttggtctgagtctcaaaataggaacaaaaccccaatgtcgcagcttaaaggctgtcagacagaagaaatgtatcttactcaggggagggttagccttttgttcttttcaggccttcaactgactggatgaggcccgctcacattagggagagcaacccgctttacttgatcatctacttatctgaatgttaatttcatccaaaaacactttcacagaacacgcagaatgatgtctgaccaaatatttgagcaacatgtggcccagtcaggttgacacataaaatgaatcatcacacatcctatgatacatttattttctattttctagattaggtcctataaatttttctgaatcccactaaaactcatgactgatacaagtaccagttttattttaatatttaatcttttatcttcaataatatatttaagtctaacactatgtatttttctccgagaagaacttttgatatggccaatagatttttgtatagccatttctcatttccattatttcttagatactatttttatactgaaattactttttggttttaccactatcttaaagttaattttctaatttttatgtaataaagtaccttcataaaccttatatctggtcaacattagaaaattgatctgtaagacttatactttttaaaattgaaaggtggttttgtgtttaggtttgtaaacacaatgtttagaagctcaatgatgtaagcaaaatacaagagttctatatatctttatcaaatttgagattcgagtattattattcatttctgatttataaggcctgttctattcttgtggaaatatcttgaaatctactatttctgataagttctttttgctcctacatggtttttattttacatatgtatagggctcattgagatttatattttttaaaaaaaattttgctttttaaaataaattacaaaatgtcattcttcattctgatgggtgaatttaaccttaaactccttcctgtatattacttctagccactacttgtatgtatgtgtgcatgtgtgcacgtgccctcatgtgtgtgggtgtgtatgtgcacatgggtgtcagtgtgtatgtttgtgtgtgggggctgcgtgtgggtgtgtgtatatggtcgcagctacatttgaataataactctttaattgtcttttaatgtcagcccagctttaatactttgtttttataaacagcataaagtttttaaaaagtcttaatattgcattctgtactttaaaaggcaatacttatgtaatttaattgatttgatttgattactgacattttgctgtatatgtattatttattttgctttattattttcttgttcccttataaaaataaaaaaaaacggtttcaccaatttacttcttacctccttttttcttatatgagagttttactgcatttttctattctatcaaagcttgcattttttctaatatttatacacatttctctagtatcgtatgaaaagaagaaactaacaattcaacagggaatacttttactcttttattctccttcttattctatgtcccattccttttctgctcattgtcccccacgtttaaaattttgctgagctaactttgtattttaaagttcagatcttttttttttttaattatcttgcagcttctcacatctattttaaaaattcctatgtaagcctgatatgttttgaatgctttgtcctctgcaaatttcattttgaaatgtggtccccaatgttggaagtggggcatggtgggaggttttagagtcatggggctgatccctcatgaatggcttggtgccatcctgggagtaatgagtgagttctcactctgagttgacatgagatctggttgtttaaaagatcctggcacttcctcctttctctctctctcctgctcttgccatatgacatgctggctccctttcaccttctgccacgatcgtagcttccttaggccctcactggaagcagatgctggtactctgcttcatgtacagcctgcaaaactgtgagcaaaataaacttcttttctttataaattactaagtctcatgtattcctttgtagcaacagacactgacacaaagccatttatattttgtgtttcactttggcaatattaaaacaaaaacattttattgcatttctgcaaaaacaaaggccaaaatctgcgtgaagatgtcagtgaagaagttcccagaatccatgtagatcagaacatgaagctaggagaaggagaggcctccaagtaagaaggtagggcagggtgagttgatgtagctgtctttaagcagactgcttgtgcacatttcaatcccacttcttcagggaaataaatggagcttttgatagatcttgggcatggtatataatgtcaagagcaagggatttatagccacatagacttggactcaaattactcctctgtcacttttttccaggtgacaccaggcagttactagcctccagaggttcagtttcctatctgtgaaaaggaaatagtaataatcatctcacaggattgctatgaaaatatgtaagagcacagtcctctgaggtaatatcattaggcacccaactaacatgtggatccctgtctttccttggtcagaactgtatgttgatacttgctttcagacagtaaaactaatttgaaattcaaacctcacatctctcctgctgagaagaggaacaatgggaaaaataacaccttttccctccagccaggcatgtctgcttccatttttcggttcactttttgtctttgaccagacacacatatagagttggaagtaccttgaaatgacagatttgtgttttgcaaaaatattctcttggctttgataggcaaatacttcttgacttacctcttcgtagtaagagatgtgtaaatcactagagtcttagatttgaacccaagatctagtcaactacaaaataaaacaaaaacccaagatagctgagggacataattaaattttgattaatctggtatcttagagtgtctctaggcaatactaacctcttacaaaatgatttattgcctaacatgtcagcttgggaaatacatgtttccagctgaaagagaattttatagggtaataggcccacactctacctccaggcaaaaagttttctaatattgtctctactaaactctctctacttctttttctttttatagctcagatttgaattcttttctggtgagcaaatattaaataaaagcttgtttctcaaatgtaattcatcaaggagattttggttaccctcacccaaaaagttatctattgaaatacttttttctcaccatcagaatgaaatgaacactatattttggttaccttatggtacctgcattgtagataagtataaatcttgtgattttatttttttaaagctttgtatagcatagccttgtattagtatcaccttcccccatgtcagctgtgtggtcttgttctaagtatgtactttggataacccttcatcaggtggcagtggtcctcaaattgtggactacttttgcatcatctgaaacttgttagagatgaaaattttcaagcccccactccagtctgactgagtttgagactcagtgttctatatttgaaaagctctccagcagaatatgatgcatgctaaagtttgagaaccactgggtaagaggacagatcataatcatccagagcccatagttctggattgggttcactcttggtgttatacagtctataggtttgggcaaatttttatggcatgtagccaccattctcatacacagtattttcactgccttaaacttcctctgtgctctgtctcttcaccttttcctgcctcctcaactacagttttaaggattttaagataaaggaagaaattatagcctttatatcattcattcaggcatttcttcaatctatagaagtgtgagacttattttataaaaaatctgggtaagtaggaagcacttttataaaatatggggagaaagagaagggcgtggatgtcagagtcctgtttggacatcttttcttgtgaaagagcacctcaagaagaaaaacacatcattgctaataagcctgtcactcataaacagcatccttcagggatctccctgtgggcctggcagaagtgagagtgatctctcaaatttcttactggctttgaggagcaaacacctgagatcttttagaattaaaattggcaggtcctttcagaatcctgcctttatctccctccaaatctgagactgataaacaaacaattcattcatccactgcctgaggcatcccctattgcttcccgggtaagacttggttcagttcagtcctgaaaatagtcacattgtttcttgtggaaactaaaaatctgacagtcagctgcctctcaggacagttcagtctcacatcttagcagcttctctgagccatctgcaactgataagcttccagatcaaaggccaaaggccccacctggcagggatcagaccttagtgaaggaaaggagaaactcgagaaactgttgagctgaactgtttccttttagataaaacttttgttattagacgtgccgttatatttagccatagtatttcagaaattctatagaccaggacattgatttcaataggagcaaggctaagaacttggtaaaacaattagtttagaattatttctcaaatggaatgttttcctgactttcacggttacttcctttactcagactactgtcatcattgtttgcttggcttagtgaaagggtctcctaaaccatctctagggcttccagttgttcccaaactcaggtgacaacaaactgtcagtcatttgaagagcagattcctggatcttatctacagagatgcattcttaacaaataccaagggatcgctgtattagtctacaagagaaagagatttaattgactccgagttccacatggcttgagaggcctcacaatcatggcggaaggtgaaggggaagcaagacatgcttagatggcagcaggtaagagggtgtgtgcagggcaattcccctttataaaaccatcagatcttatgagacttatttactatcatgagaatagcatgggaaaactcctcctccagggttcagttacctcccaccaggtccctcctaggacacgtgggatttgggagctacaattcaagatgaggtttaagtggggacgcagtcaaaccatatcaggatccagaccacattttgatgaacattattaactccatctccctctctccattgtctctgcttccagagccctcgttctatagtgcaaacctaaccatgtcagtctgctccaagaaaatagttcacagtgattcaataccttacaaaataagcacaggctcttagccagcaatagtagatatctttttacatgtataaaggcctgatttttttttctataatgtaggtaagacaaattataaaagtagatatgctgcaagaaattcaagaaatgacagatgtggaaacctttacataggaaatcactaagtacaaaagataagaaagatgaagccaagaatgagactagtactgagaaagcatggagtgaaacacatatatatacatatacacatatatattgtatgtagaggtgtatgtgtgtgtgtgtgtgtatatatatatatatatatatatatatatatatatagtttatgaggagaactatcttcttgttactgaaaccagagagaatgtgttcctgtgggtagtaaaggaaattaaaatattttacctccaaatatatttcttttacgtattttgaggtggctgtttcaagagcctgcaaacagaagtaaccttgcaaagctgtattttgtcctgggggaacggaagaggcagggatttgcatctctagagaatctaccttgatacagccaggttttctctgtggccttcacttgtccgatctaggaaagattaactgagaatctaattacttcaaagatctaaaagaaacatttactatctattctctctgagggctgctacctgtgaagtttatttacataacaagaccacctttgctagccaggcctcatcttctcccccaacaccctccctcccccatagcccatagcttattttgccactgtcttaggctgttcttgtgtcactataaaaaaaaaacctgagaatgggtggcttataaaggaaagaggttaaattggctcacagttctgcaggttgtataggaagcatggtgccggcatctgctcggcttctcgggatgcctcaggaagctttcgctcatggtggaaggtgaagcttgagcaggcacagcatatggcaagaggaggagtggagagagagaaagagacagacagagaggaagagtagggtttacacatgtaaaccaccagatttcactcactattgtgaggacagcaccaagccatgagagatctgcccccatgacccaaatacttccaccaggccccacccccaacattggggattacaaatcaacataagatttgaaagggacataggttcaaactatatcagccaccatagcctggtttgcaaggatccaagcacacattcttttggtaaactcaagatggtatataggcttctgaaccccactgggggattgggtaatcattctgtggttctcccccatgtgcatattaataaatgtgtatgccttttctcgaatctgccttttgtgagttgacttttcagcaaaactttacagggcaaagaagaagtattcccttggccccgacagtaagacaccttaaaatataatgaataatatcctcataataaatacagcaatcagtttcctagggctgtttcacatgtcctcacctgttgatcagtggtataaggcctggcataaaaactggcatataaaaactaacctgaagcacagttctacaatgctttggtagaacggggtgttcttctcacctctgacttaattgagggatatatttttaaactgtctaaaatagaattctacaaaatttagtaggagtggggtatgagttaaacaaaaatttattaaattctaacccacagccataaataactctccctccactgagctttaagtagatattatgtagtaataaatttcatgttgtactcagataaattcctggagtgcaaacttgtataatgttgttaaagtgtatgcagacataattgaacaaccctcgggtatgggatagaatttccattctattgtaaaaattgagtagcctaacagtcacaaaactcccctcaaaagcccttttctgaggtggcccaaggcagtatgtctaggcaggagaaattatgctcaagaagtaaaatttcgtcttcccaaacacaaagaactaatgcaaccagttccataattaacctggaacatttgtaaaatagattgatgtaactctttttgaagaatgtggttatcctcattttgtgatgacaaaatgaagcttaagagaagtgaagtaactcggctagtaagtaacaaagctgagattcaaacccatatctggttgtctgcaaagcccatctttttaactcctacactacactactctttttcaaaaaccatttctaccaaccctgactcccgtgatattaagatgcctcattaatggacagaattcatattgaacttacttgtctagtccataatcaagttctcttcatagaattgaagactggggaacattagcacagtgtatgaggccttcgtagtttagctagtactacttatccagtcacccctatgcatctactctggtctcaagtataccaaaccacttgtaccatgctcttctgccatatacctcagcataccattgattctacacagaatgctctctcctctaatgcaacaggcaggcttctagtcactcttcaagtctcaattcaaacatttcatctaattttttgctgtgggataatatagcttatataaaagtgggaggcatatatttgtccagattgttttaatacataccatagggatggttagttagcattttgaagtaccctgataaataactgacagtctgtgagtaggtatttagtacttcatatattgttatttgaatctataccaaaggatttataaatcagcaaaaggatagtagaatttgtttttttgtttttgtgaaatcaacacttcttaaggtaagtggtaagttaggatactttctaaaggccacatacacctgcataaaagtagtacagaataaaaacaatgggtacatccatagactagacgaatatcatcagtgcaccacttaagttccagagcccagttagtcttatgtccttccacttttggagcctggttagtcctgttatcagaagatatttgtatcaaccttcaaagtaaaactttcttgcaattaagacagagagtggtacttgcctaagccctgagaacaagctgttttactgttttgtgctgatttttcagtagatgtacatacattcaacagaatttggtctaagatttgctttcatcataatatgccacctggtgtgatggtagagagtaatgatagttatcaaccctacataccactagtcacaaaagggatactagatatttacccaatgagacaaacttcactgcttagccaaaatctctgagacaagtttacgtcatcttagttaatccttccctgagtatcccaaatggtgcactctatttctattccatatcctattatgttttatcccattaaatgaatgaatataatgtatgttgcattacagccatgttttgtggccttttagtacttataacctatcaatgccatacattttttgtacttactgaaaaaatattaaatctacgactataatggaatacaatattgcacatgctttttaaaaacatccacacatatctatttctacttgctacatattctgttatacatattttgttttatatcttttgtctaactttagaatccctgctagacttacacacatgttcatgcacacatgcacacacaagcatttccaaatacattttggtcccccgagggacaccttattcatgcatgtttagcaaatggctaaaaatgagtcttatatacaaggcaagcaataaatatctgttcaatgaataaatgacagaaataatagataagtatatattccttgtcacatgactcttcccgttttatcaagggacagagagatgattcataataaaggcattttcagaagactcaaggaaccaaccaatgaaccaatataaagttatttcattgaacccatttgttagtgagtcagcattctttcctcgctttggttttctttatagccaattaagatctttgcaaaatagtttacatactttcttcttagacaaatatctggctgtattcatctagaatttgcaatattatctattttgcaaactaaaatcctagccgaaactgatgttgacatcctattgcaatgtggttctaccagatattttttttcccctgagacagtctcactctgtcacccaggctggagtgcagtagtatgatctcggctcactgcaacctccatctcccgggttcacaccattctcctgcctcagcctcccgagtacctgtgactacaggtgcctgccaccacaactggctaatttttgtacttttagtagagacagggtttcaccatattcgccaggctggtctcgaactcctgagcttgtgatctgcccaccttggcctcccaaagtgctgggattacaggcgtgagccaccgtgcccaggccagattatttataaatagtaaatgttgtacaattaataagcttgctacatatctgttattcaggtgactaggtgtagtgtaaacaattagcaggtaaagaaaaggtacctgatgtcacaagacttgtaactaaaaaagtctaggtgagtctgaagaaaagggggaaaggaaaatattaggctaaatgtaagttgtagtacattagttgagtgattaaaatcaaacatctgttatgaacaacacaagtgaagccagtaagagagttgctatacatttagtggttttcaagcttagctattttaaaaagagctgatattcaggctgcatcctagaaaaactatcagatactcaggatgtgacccaggtctttgtattcttcttgaatttcccagatgattccaagatttagagaacaaaggttgcacctcactgctatgattgaaactgacctacatgaaaaacacatgactggaaaaaagcctatggtggcagcagtagcatattagaatagctttggtatcattcctcaggaggttgaaatatctcttatggcccatacatgggttatgacaggagctaagttttaaaatcacattaatcaattgtaaactctttagagtgtatttattgggtttagggtgaaaacaagtatcagatttggtatgtatagaaggaaagcatgggagctgaattaaatactgcaaacggcataagaaccaccttcatttcatggtgggagggtggaacttttcttccagatagccaggtacaagagaaaacacagcagatgtactttgcattgaataaagactacacatcctccttaatcaccacctttcctttttatggagtaagtgtgaattattgtcagtttcatcatttgtaatcagtggctgaaacagatgctgaaggtttagtttaaaatgatatgtgtctcttataacaatttgcaatatgctctccaaggactatttaccttccacattgcagaaactcactgcaaaggagtttattcttaaaagcatttgaggtaaattaagcacaatgaatgcaactttcgttagagataacatttagcagagttattatagggcttactatgtctgcagtgagtgggcatttgccttaatgactttgtttaacaagctttcaattccttgcttatgtgatttaaatgctcttataactatttgcccttaggagtttggtaccaacacaaggcaatcacaatttgtttttttgttatttttaaaccaagttagtatgtaagagaaatatatttatagttctgatatcaagggtaatgacaaaattcttaagtttgttgtgcatgttacactaggcattagcatcatatatttataatataaaatatatccatccacacacacaagttgctcatttcatacacagagctagctgagtgtatacaatgaatagaaaagtatatcaacttcattttctagatgaatcacagaaaagcacatattttgaaaatgaaatactgcaggtaccttgaagaaagtcagaaccaaaatcaaggtaggacataaaagtttttgttctgatctataacactttggattttttcaaaaataatatgttcatttactatttgtgtaactaaaaatgagctatataacaatgactaaaaggaaataacataaaaagagaaatgccatagaaaacttagaaactgtaaatgaccaaagtatagtccttaataatgtgagaatatgagaaccaagctaattttaagaattaatcattaagacgcagaatttaacaaaacaaaaaaaaattttaaaagattagttttattatcaaaatggcacaaaaactaaattcttctgcaatttcaattccaataccaattttaaaaatttaagtttatgtttttgtgtagtggagtgagtatctgccagttaatctatgacacttcatgatatttcatgaacacttcaatagtcctctaaacagaatcagccctttgtccttggggttttccacaagatagggtagatttttcccttaaaattgatatacacagcccagaatattggtggaatgtttaattcctcaagttctaaatatactttttaggccatcagccatataaggtgtatatattcctccttccctttgtcttgataaaactgacggacttcagattatcaagcaaagagatcactttattatattgtatcaggattattcttcaaatgacattaccaaatgtatcccattattaaagaaaatgggtgctttgtttgatttaataaagcaacatttactgaagagaggtcatagtagacttacaaaaagtatggggtggtatggactgaattacttccccccaaaatttatgtttgaaactctaattttcaaagtgactataatctgaggtaaggcctgtgggtggtaatttaggttaaatgaggttgtaaatagggtcctaattcgaaggagtggtgactttatgagaagcagaaagaagggagagatgtctttctcctttaacacatgaagaagtcctgtgagcacacagtgagtaggctgccacctacaaacgatgagaagagacctcagaatgaaatttactttctggaatcttaatcttggacttctagccttcagaactatgagaaataaatgtctgttgttggacccatccaccctatggtattttgttatgaccgccctgagcagtctaaaatgtgggtgttctactcttttctgccactgggaaaaggacatatcagatttttgccaataacttacttctcccatgtggtgggttgagaggtagttcccaaagagatacgtccatagcctatcctcagacttgtaaatattaacttatacggcaaaagattgactattatcttacatggtaacagatgtgattcagttaagaattttgagatgaggggattatctaagatttttctggtcaggccttaaatgccattataagtgtccttgttagaaaaggcaaggtagataacatcgaagaggaggtggcagtgtggccagggaggcagagactggagtgatacagctacaagttaacaaacactgacagccaccagaatctagaagaggcgaagaactatcttagagcctcccaaagaggtgtggctctataaacactttaattttgtgcttctggcttctaaaaatgtaaaatttctattttaagccattcaatttgtggtaattttttatagcagccagaggaaactagtacaccccatttcagtttgctcatccattttcagtggatccacagtctctctacacatctcatatttctttataaaacatttaaaactcctaagttaaaccatgtgtgtgtgcatgtgtatacaagtaagtcttgagacatttgggaagtctctgttaactttgtcaacttcatttaaaaatcagttcctcatattctaaggatgtattgttagatatattcccattaaaaacaagaataaggcaaggattctggcttaacccttatctataacattattttaaaattcttctgaattatatgaaaatacaataaggctcaaaaataagggatttacctattaaacaagaggagaaaaataattatgagcaaatgacatgagtttccacttggaagttaaatagaacttaccagaaactgttaatatgtgagtacaaaaaagaaagcaattaagagtggcttaaacatagtgacagctttatgtcagctgtactcaactaaagttaagatgtcataataaaatcttggtaaaaatataaattatttaaaatttaattattataagaactataaggggctggctgtagtggctcatgcctgtaatcccagcactttgggaagccggggcaggcagatcacttgggcccaggagtttgacaccagcctgggaaacattggcaaaaccctgccactacaaaaaatagaaaaattagttggccgtggtagcatgtgcctgcagtccaagttacttgggaggctgaggtgggaggatcacttgagcctgagaggtcaaggctacagtgagctgtgatcacaccactgctctccagattgggcaacagagtgagaatttgtctcaaaaacaaaccaaaacaaaaaaactataaaacacataaaaacaaaaattaaattcctatggaatacatgtagaaaaaggcatgctatatttcttgatggcaaaattatttttaaagcaataagtatctgccaaattaatagtttggcttaatgtaattgtaatcaaattgtacaatgttaattgtaatcaaataaatcttagctagatttatttagactttaactcaagatttgtttgaaagaataaataagccagaaaggctaagaaaaaaagactaatatcataaagatacaatttttttaagtcaaaattttctaatactgccaaacaaaatcaacagatcaatgaaacaaaatagatagccctatcagtcatagtaattttatgttaaggggacacatcaacaattattagtgaatgggagggctattcatcaaatgattgggaacattagatgattattttgaaaactataaagtttaatttttagcatataacaaaattctggatacactgaaaagttaataacaaagataaaattttaaaatactatttataatttatatgaacattcttctgagctctgaattgaggacttctcaaacatacaatatttagttttaaaaaatccataataaaaacattttatattttactacataaaaatcataatcataaaaatctaacattcgtattcataaaaacattgatgaacaaaatgaaaagtcaacctcaagagaatatacactataaacatgatggatatagtttttatcattaattacataatagagatgttatttttgtctgtgttaatttctatttcccgttgctgtcacgtcacctaaatattcaaccatgaatcttgaagtcccgggggtggaagggaaatgttctacacgggaaggatatgtacatcccttctggctcaaggcattgtggggatgaggaagaagattcaagcagagaaggaaagtagacttcaattattgatcaccatctcccaccctattctcatatcttttgagcttacattttgggaagctgattttaaaaacatccaagagttatggagtagactctctagagagtggcttgcctcactatatactcatagggggctagtaatgacaatattctagaagacatatatgtggtatccatcatggtactggagtgatggcttagaggtgtcatttgatgctgagatagactctcaggaagtgcccctggtcccaccagtctctgtatgtcaagcaagggacccagaggtgccagtgtgcctattgagagggcagagtggtgcttgaatctaggtgaagtgaccatggcgggcaaggatgtagaaaccagtggcaaatggccagaattgaggactccagtgaagggtgccagcatgtcaagcttaaattgctaaaggggactcaatcatagtgagaagtcacccgtcctgggaatcaatagcccagctactccgcagtgaagacaagaggatcctgagaggtcaggtcaatctgaggaccccagcctctccagtgctctatgatcataggaaatggagatggtagagagcacagaaaggaaaatggcctgtgaggatcagaggatttgcaggttaaataaggggcttgcaatctcttcttataccgtaacatgagcaaatttctggcctaactccaggtgttgcctatctgtatatttctaaaaactgaagcattctcctggaaagtgaatcactgagggtgtggagtccgggatagaccctttaggattatgttctcacttcttttctcatctatcccttcttttttacatatctcttgttcaagaagcaaagacctttccattctgtttgccgtatcttcttgtgctatggccataagcctcttggattcgttctcttttcagaggggagattctctccaaagtctattaaataaacactttttctacatcctccaggtatacctctctaactgggagctgtggtatgacatggaagtagaaacctctgaggatgaaaattatttgctattctatcttctaaatattctctagtagaaagtcttaaatagctcacgcaactgataagaaaattcagaaaagactgaataagaaattcacaacagaaaaaaataaacatattaaataacatttaagttcacaagtaatcaaggatacatatttaaaaacacaaagccttattaaattggcaattaaaagagttcccaatgttggagagagtgctctaaaagaggatttttttttttatcatgctgctggtaatgtaaattttgctttaagctttcataaagtaatttggctatatgtttttgtattcttcagatgatcttcttagatcatgtgcttcttatgattagaaaagacaataaataatggctttaaacaaagctaagtatctctccttggcattcatcactgctgactgtagtagcctatgtggcgttggtgagacgtccacctggcatatcctatagcgcttatctacattcaccagacatgtatatcagtaactgttggcaggcagccaaagtgacagggatgttgtgctaggagttttaagtagctttaattttctgtttcaactgaaattctatgtagactttttcaaacgtatgtaattattcaaacataaatcaaagcactaaattaaaatacaaatagtaaaattatttttcaaagaaaagttagcacatgaatggttaaatccttttcttaagagatatagcaatgtgttgcacatatacaagttcatgaagcaaatttagtacaagaacctaataataacagtgacataaaactgtatcaaaatgaagatgaaatcccagattaaggtggcaaatgttcagctgaatcactgtctcctctgacaggtgacttcctagggactgcattaacactcagaaaagcaagcaactgtcccttcaattccatggtggtgttttcactaggaaattggtacaaagttaccatcatacacacaaagaataaaggattcagaaagactgaaagccagaaaaagtagtatcttcctaccttttaacttttcctggaaaaattacatatataatccttaaccctaaccctactttagttctatatatatagagagaaacatatatgtatatatatattttttttccttggctcttttaaaaaggtgatagaaggagccctaaaaaaagaagtgtatgtttatctgctttgtaaaatgtgattaagagaactattttccaaagctggattcctctaagctaaatgaaaaactattctttcctctcagttctatgtttttctaaaacacattaaaatctttggttctgtagtgtaggattttactgaagtagagtgagactggaaaaaaatattgttttccaacttaagaaatattcacagtgaatcctttaggcacaggagtagcagtgcagaatatcagagatcatgtcaacacctttatttcacaggtgagagctcagaggctctgaaagcacaagacagtctttggaggtcatgctgttagtctgtgccaagacaagatcttgctcctctgactgtagctcattcaattgcatcatcagtctggtgatatttactatgtagcaaggacaatgtctttccctcaattttccagatcaccaagcaatgatgtgcctgttacacatgacattaaatttaagatgggtctaatgaaggggaagtttaaagtgcatgaatagtgtttcaggcccatatactcctctcccggtgtctccatttctctttcctgtctaaggccaatgaattgccacagtatctattacttgaagaatctgatgccatttgctactttataacttacataagcttcttgtgtaattttatggaatgagattttggatgataaaacatttcaaatgaatgcaaacctttgtgacgttttctcagcacatatcacttaatatctattatcgtatgagataatacatgtaaaagggcttaattcagacaatacatgtaaagagcttaactcagtgcctggagaacagatataaatccagctgatcacatgtcaatgattttactttataactctgattcttctcctagtagtcatggccttgagactcttccatatattataacccaggccaggagttcttttaaaacttcaggagagcggggagattggtttattttactactgatacatcccaaacacgtagaacagtatcaggcacagaatagactcaaagacataattcccaatgaatacatggatgagtgtaagtaggggaatgatacagtaatgtaagttgtgagccctgctctgagacttgaagcccaagctcacagcaaaagctgctgcccagattgacagagatggaacttattacatagatggaacttactgcaacaaggctgatcaagaaacagcttgtgaggaatgttttcttttacaatgttagggtaatgcaggaagatgataagtatcagtaaggatttctatgacattgcttccattacaggaattctttaattcctcctccaatctggaagacttgttgtatattttgggctgaaggttttttgttttgttctgtttttttgtttttatttcatggatactatttcaaaaactgaataacagtgtcttaaacccagtgacagacacatttgttatgggtatcttaacttgaaactcccacagacctcggacaatttttctattagccagcattctttttttcttttcttttctttttttttttttctttacatttagaggaagtatttaaggaatggagatactgtctttttaaaattgtatttaatttaacaatgtgaatcagattatttaaaaataaactttagtaagtaatagttccagatctttaccttaaggtgatttaaaaagtaataactagatttgtcagaggtgtcagaacagagcaactccatcttgaacaggccgggtaaaatgaggatgagacctgctggtctcagcaggtctattcttagtcaaaagatgtttatggttaagagaacagaaacagacccaggacttaacagatccagaaaatgtcctgatgtcccaatatcttaagaacaaaaccattcctagattaagaataagtttcattttaaagataatacagactcttggaaaagatggtagttacacaaagattagcagtcctttatcacaaatccttgtagtagagcacatctcccccttgatttttgttatcttatatataagcaagcattgtacctaaggtgggcgcattcctcctcttactttcgggagcgccccactctgtctatggagtagccactctttcattcctttactttcttaataaacttgctttcactttactctgtgaagtcaccctgaattccttcttgtgtaaaatccagggactcacgtgctcaccaaaagtagtgttcagaaacatatattgaaattagaaatttcttctggtcgggcgcgttggctcacgcctgtaatcccagcactttgggaggccgaggcgggcggatcacgaagtcaagagatcgagaccatcctggcgaacacggtgaaaccccgtctctactaaaaatacaaaaaaaaaaaaaaaaaaaaaaatgagccgggcgtggtggcaggcgcctgtaatcccagctactcgggaggctgtggcaggagaatggcgtgagcccgcggggcagagcttgcagtgagccgagatcgcgccactgcactccagcctgggagactgcaagactccgtctcaaaaaaaaaaaaaaaaaaaaaatccaggaactctctcttaaggtctggattggggcccctttctggtaacagatttactaaatgattttgaaattaaataaaaacctcttataaactggtgttattaagaagatgcttcttttattttattttattttattttttgagatggagtttcgctcgacttttctcccaggctggagtgcaatggcatgatcttggctcactgcaacctctgcctcctgggttcaggcaattctcctacttcagtctcctgagtagctgggactacagggccactaagcccagctaatttttttttttttttttttttggatttttagtagagacggggtttcaccattttggccagtctggtcttgaactcctgacctcaggtgatccgcccgccccggcctcccaaagtgctgggattacaagcgtgagccactgcgcccgaccagaagaaatttctaatttcaatatatgtttctgaacactacttttggtgagcacgtgatctatgttatggattttaataaaagataatgttgtattcagcaatgctgcccaggaaaatataatgtgagctgcaaatgccattatgtcattttaaattttctactagacacattaagacaagatgaaattaattttcataatatattttatttaacccaaatattatttcagcatgtaattaatgtaacaacaattaatgagatattttactttttttgtactaagtcttcaaaatctcagtttgaacaagccacatttcaactgctcaaaagccacatgtggctggtgcctgtcattataaacagcacagttcaggaggttaaacagttttggaatcagacagttctgaatgtaaatccttgttcaacatttactaactatgagacactgaagaaatttaaacattccaagtactagttttagcaactaggaaatagggataatttataaattgaacattttagaaataatatatatgaaccatttactaccatgttaggaactcaggaactattacttcctgagtaaactaaggtttcagtgttcaaaacataatttctattaaaggtagctgctattagcaacatcagtgtaaacctttgaaacgtcagaaaaattctgttagtttaatgttcttcactgagtaaccaatattattaccttgacatgtggaaagaagctcatgattgtggaacatctgaaaggtgacctctttagcacacaataagataatatttttgtcacatagtgttaaatgtgcattaatcatgaggcagctcaccttcctcataaatcacacatgaaaaatgacaggtgatattctcattttagtggtattatctttattaaaagccacataatgccttggtaataagaaaatttattctggaataaattaaaacatttctatgcactctgaaaattaatttccttttgtttcaattcatattcacaccccgatcattccagtctagatgtataagcttgacttattctggtcaccattaagaatatcctcaaggagaccaattttggttcctctggaagaataatataaatttagatttctgggaatggtgtgaacagaccctggagaataagatgctgaaggtttagttttacaacataatagaaaaaagaaaacttattttcttgtcatacctaagtaccagttgcctgggctacgtcacagaatggtaaagcagtcaataaaattaaatattgtatgatactttttatactttgcaaagtgttttaatgctaataatctcaatgagaaaaaatatagagatacacattaactgaattgtagtaaaacttgcttgtttgggctgcagtaggcagatagatgaataaacagcggagaagtttctatgagcatgtaaaggaaaatgacagattttagaaaggtttatgattgttacgcagtgataattcagaggaaaataggttttaaaaatgatttttgtcagattcagccaaaggaaattaaaagtcaacaaactgggtattaaaatggagatctctttgatatactgatttccttacacaatggagtactactcaaccataaaaaagaatgagatttgtcatttgtaacaacatggatggaactgggggtcattatgcttagtgaaataagccaggtacagaaagataaacatcatgttttctcacttatttgtgggatctaaaaatcaaaacaacagagctcatggagatggagtagaattgtggttaccagaggctgttaagagtggtgaaggggtgggagaagtagggatgggttactgagtacaaaaaaaaaaatagaaagaatgaataagacctagtatttgataacacaacagggtgactatagtcgataatattttattatacattttattattattattattatttgagacagagtctcactctgtcatccagcctggagtgcagtggcacgatcttggctcactgtaacctccacctcctgggtttaggcagttctccctgcctcagcctcctgagtagctgggattacaggggcctgccaacatacccaggtaatttttgtattttttagtggagacagggtttcaccatattggccaggctgaccttgaactcctgacctcaggtgatctgcccgcctcggcctcctaaagtactgggattacaggcgtgagccactgcacccaaccaattttattatacatttaaaaataactgaaatagtataattggattgtttgtaacataaatgataaatgcttgaggggatggataccctattttacatggtgtgattattacagatattacagaccttgaatatctgtatcaaagcatctcatacaccccataaatgtacccacaaaaattaaaataaaacttttaaagggagacatacattttgaatgctgcactgaaacttaatcttaggaactttctctttaacaggatgagaaattattatagagtcagagaattagttcaaaccctggacttcaaatcccatcttacttcatagatgaggactagagaaattgagtgacttatccataaacaaagtgatagctaggggcagagggactggaatccaagtaatcatgtgatatttaatccaagacttcttttatggcagaaagttacttctaaggaaactgatccacaggctggggagggatatagatgaatatagcaagtggaatatttcctgacattttattccctttggctgaatgtgttcacacatgatgaagtaaagaaaataattaaattatatgttattatgtactagagagctccaaagtgagccataaaaatgatggatattttggtggggaagatgtgtgatttattcaaataattatttaaattctgtgctttattttgactagagaatgcattgtaatattttcagtttgactgtcatttttaattgttttgttattcatggatcatgggcagaggaagaaaagttgtcactactgaagcatttctagggatttcttctgggcaattaagcaaccacttccccctcatgaattgctgcagagtcacaatgcctaggaaattgatcagatgaacgctggttaagaaaataaccagctggcattttgaatgtcggatagggaatatgactctctattattactacttcattttggggattcgcagatatatgagtgccttgtaaaaggaatttcagaagtgagttttcacaccttgccttgagatgaaggattcttcttggttctactccagggaccttgatgttcctgttgccccactccctgtggtcccactgtgcttcctgtacccaggaatcagcccaaggtacagggagtttatttttctgaagtaaatgacaagtgaatgtagaaaagtttcagtagagtaattttgaaacaaaagtaaaaatgcatatatgcccaaaagtacaaaaaaagaaaagctgtagagaaaactgttatttaattctcaaaactgatagaaagcaatgaaagattttggtggtaacttttgattctgctgatagcacaatcaaggaagatattggtaattgaagtgatataaatgtctataagacaagcagcattgttcatcttcagcagaacaagtaatgaaatggaaatgttttggggttcataagaaattacttcataattttcctaagagaaacagcactcaccaaatgttcttttcttgtgaataaggcattgccgctatcagcaaccatttcttttattattcttgagaatatttctgatcctatattctctgttatatacttcatcttcaacaatgtttttaaaatcccttctaaactctccttttgattagtagagttagttttggtcaaaattaaatctaatttgtcaacatctctttgtggcaatcttttgccttattaaacttcaagactgggttactaagtcttcttgttgatttagcccttcccgggattctgagacttcttgcctgcaaagaaaaaggaaatactagaatatcagtcaagagctctttgtcctactgcatttgggctgcagtaacaaaattctgtagagtgggtaatttatttaaaaaatggaatttattacttagagttctagaggctagaaagtctaaaatcaaagtgctggaagatttggtgtctgataaggacccactttctgtttcttagatagcaccttgttgctgcatccccacatgtgaagggacaaagaagctcccttcaacttcttttataagagcagaaattccatccataagggtgaaactcttatgatttaatcacttccaaaaggtcccacctcttaataccatcaaattgagtattaggttccaacatgaattttggaatgataccaacattcagaccatagcattcattaaagtcattaccaagcctgtctcattattttcccaattctagttactgagtgtgtcaaagactggctaactgcttgtcaaatgcattttcttctttgagagaacacacctagaccacagctcccattatccatggcatggccaagtttcatttcccagttagtttcagccataccacttagatctggtcagtggagtgtgattgaagagatgggtgtgtcactttcatccctggcccatgaaaatctctttcttgtgactccttcatttaatttcccctctcttggctgctgtgtgcagatgggcatgacaaccttgaaacccccatgataaacctgacactattttaagatgtaaagactgcagtttcgtaattactgcttgaaggtgagacattcatcaatcagaaacactcattttcaacctgagtgaaaaataaagttttttttaaaaaataaaaaaccactaatatttggtactttatctattacagtggctatcattactttatataatactgtgaaatacacactcctgcaatacattccaatcctagtaacttagtccctgccctgtttctgtttactgcacctacatttcaattgctctgtagggctctgcctttcctcttagtccttccagaaattaagctttgctctgaaaacctattcacatgccaatgtattggatagaccttctggtgttaggaccaggcaagaactaggtgctctcttcttcctcaaacacaggcttcagctagtctttagagaactgctgtacactctgccctccagattgctttttccatgttcttgactctagagtcagtatgcccagctttggttatggccatgtaagcattttacatttttaaggttttcctgctgtaggagaaatagattctatgttgtgctttaaaattagactggcaaaattatttattttaactaaaaaaaataagatatacaaggaagaaagtcaacatgaaaataaaaacctacatctttttaagatgatgagtacattgtgatacgtttaatgaaataataatcaccatttgattatcctggataagcttcatggtacaggggaacagaagagaacttgtgggcaggtttgcttccaaaaggaacaaagataagtttgtttttcccaaattacttgtctggtaagtcactaacctcagccagggtggagtcagtaaaaaggcaaagagaaaccagcagttacactaatccactccgtccacatggcaggacatactaggagggcagaaaaagagtttccctctgacagaaaaagttttgaaaaattggttatgaatgagcatagatatcactgaaacttttgagataaaaatatgtaaatattttctaatggtctccattttatttttaatcagataaagcctaattcaatgttttacactctcaaactaacttgtgaccattttctcacttaagttttctcattaaatgcctttgaaacttgtgcctgtggtttcatttataattttgtccagtggaaaccccaatatctggggcttacatttttaaaattttttttccagcttcattgacatagaattgacaaacaaaaattgtaggccaggtgcggtggctcatgcctgtaatcccagcattttgggaggctgaggcaggtggatcacctgaagtcaggagttcaagaccagcctgaccaacatgatgaaaccctgtctctactaaaaaaagtacaaaaattagccaggcgtgctggcatgtgcctgtaattccagctacccaggaggctgaagtaggagaattgcttgaacccaggaggcggaggttgcagtgagccgatatcacgccattgcactccagcctgggcaacaagactgagagtctgtctcaaaaaaaaaatagtatatatttacagtatacaacataatattttgatacacaaatacgttgtgaagtgattaccacaatcaagctaattaacatatccatcacctcacatagttaacattgtgtgcctgtgtctgtggtgagaacacttaagatctgctctcttagcaaatttcaagtctacaacacaatattattaactgtatattattattaattatactccatactatacattacctctccataacttacatcctgaataactgagactttgtattctttgaaccacatctcccctttggctccatccctatcccctggcaatcaccattctattctctgcttttaggagtaacgttttaagattccctgtaaaaacgaggcaatgaagtatttgcctttctgtgcctgaattatttcacttagcataatgtcctccaagtttatccatgttgttgaaaatgtcaggatttccttctttttaaaggctgaatagtattccattgcatatatatacgccctattttctttcttcatctgttgatagataccgaagtagtttgcgtattttggctattgtgaatagtggaatgcacatgggcgtgcagatatctcttcaagataatgactttattttctttgaatatactccagaagcagtgtttctagtcaatatggtggccatatttttaattttttgaggatcttccatgttgtttttaataatagctgtactagtttacatttctaccaatagtatgtgtgagcattcccttttcttcacatcacgatgtttatttattcattgctaattactacatgcaagcagagtataacaaatgtcaataataagctataaacttctgaatattctaaagttcttaccatctgagatcagttttataactcccttatgcttaatcttcattacataaacacaacttcaaaaagttcaagggagtagagaaaatggaagaattcaagggtccatttaggttagaacacagaatcagtgaatccaccttagtgttgctataatgagttgaagataagaaagaaagaacaattttgattggaaaatgggattttcctaaggctaataagaatgtaaaatatatgtggtcattagaaatgcaggagtagagatgctttactaggaccacttaagaattgatacttgttgtatagttagttaatccttatattgtaagctaaaaacattacacaaaaataagaattttgtgtcatcaaccattgatctgaatacaagttatacattacccaacaataaatacacagagtctttatggagggagaaagataatgataagagttatttcaatgatatctatagcctatgaagatgggatcaggacaagttccatatgcccataattagtatgcatttaaatggaagatgctttcttcattttcaaacccttaatatgacaattttgcccttgattttcatcagcatcacagatttgatcagctctttatgttaacaatcaaatctcttccaaggtgtaggtttgtttaacacactgtaggtttatttaacttcccatagctgtattttactcaacaatatagttatatttcatcacaaaaatgacgctctgatagttctctgactcttttatggccaacaggaaatgtaacattactgaaagggtttatagttagaaaaaaatagctaagggccaactactttctttttttttttttttttttgagacgcagtctcgctctgtcgcccaggctggagggcagtggcgcgatctcggcttactgcaagctccgcctcctgggttcaggccattctgcctcagcctcccaagtagctgggactacaggcgcccaccaccacgcccggctgatttttttgtatttttagtagagacagggtttcaccgtgttacccaggatggtctcaatctcttgaccttgtgatctgctcgcctccacctcccaaagtgctgggattacaggcgtgagccaccgcgcccagccaactattttcagcttgagtatcacttttactgctcctgggccaaacataaaaactgatcagtgaagggtccgtcaacagtatttaaaaaagaaaaaatactgaactgtgatggctgtgtagctctgagattcagtcattattcaggataaccttctagatgttcagaccaccacagataatatggtgatacatcttaaaagtggcgagatggccagagcaaactactgccacgtgttaaagccagggaatagtaagctcggtctttgggcaatgaatcctggagaagacacagagttattgtggaaaaaatcggcaaattttggagtgcattaaacattttctgtgtgctaaataattagaatgagacacgtgtgcgtttgctttcaaaagaatgcgtatcttagattaatcaatacatttgtacttttttttctttttttttcttttttttttgagacggagtctcgctctgttgcccaggctggagtgcagtggcgccatcttggctcactgcaacctctgcctcctgagtagctgggactacaggtgcccgccaccacgcccagctaattttttgtatttttgtagagacggggtttcactgtgttagccaggatggtctccatctcctgacctcgtgatccacccgcctcggcctcccaaagtgctgggattacaggcgtgagccaccacccgcccggccacatttgtacttttttacagctattacaacttataatacattttgacattatgcttttctacaatcaagcaattctacaatccagctgctacacatgagactctgcaactgtttcatgtgaaaaaggaaaatggagtctccattctcaaaggtaattattttttttcctaacttttagcatgctgttcatcactaattctttcacatgcattgaacaggttaacactcgatataacaaaagcatatttttctcgggaggtggtggcttagaaagcaccattaaattgggtatgaaagccctaatgtgaaaaagaaattccctttataattccaggccaactgtgaaccaacctgtgtgattttgcttgagtctgcaggaagtaggtgtgtctgtttaggacaacctccagctagagaaaaactgcattaaagccctccaaagatcctcaagtggtgattctccatcctggctgcatgtttgaatcaccttaggagtgtttaaaccactggatgctctggctgcacgctaggtgaattaaatcaaaagctcggggtagattcagaattcataatccttataacttccaggtgatttcaatgtgttcccaaggctgatgttggcatttctgagggccttacagaaattgggatggcacattacattacattgtgcaggtgcctgatatggctctcaaactgaaaacaagttaaaaaaacgtcacatctgtagccagttactcagttatctagtctctcaggggacatgttaacagcatttattgatttggcaagataaattgttatggcccctggggaaatattaagcacatctcagcctcactatatttccataatcattttgcctaggcttaatttcaaacatatttcccttattttaccctaaatcagcctggtctaaatctgcttttgcatggaatatggtcttatttttaggctttttataataaccttattgaactattgcatgatcactgtgtgcaattacctcattgcatctatctgggtgtgttgtttttctcccttattttttgcaattatttcaatggagtataattcaattacctggaaacaggtttttttcaagtagaatcttaatatcaataagtatttaagttctcactgtatgccaggcatgctgttatgtgcacatgataacaaacttgaattaacccatgagtgttcctctcaatggggccacacagtcatgaaagtgaccaaagagtaaaataaataagccccaaaattcattgaaataagttgtcattagtcttataaagacattctatgaaaagaaaagagtaacatggataggagacaggacacaagggatggtgacaactgaacttggtcatttcaaccctgtaacttttttctgattaataaatatacataaaaaagtggaaatatagaaatatgtaaagaagataagtaaaatatcactagtaatcccacaatctaaacaaagcagacctgccccatcctgccccatatgtatgtatacgtatatcaaatatatgaatgtgtgtgccgatctaagtaaccagagagagaatctttaaaagaaaagatatttgtttgggaataaagattgtagtgggaatatgcatgccatagaaatctagatatgtattcagggaggtaaagaaagacaaagcctttaaaagaatgaagaggattatatggttgttttgatataattaattatcaaagatcaataacaagagtgaccagcctgaggtggacagcgagttgctgggcagatgtccttgcagaaatatttttttgtgcaaggttgtgatggactttgtgtaagttgtgtgtttgtagtcttttgtgttaggctttgttatcaggcatacaagcataaaaaccctcttttcatggccttcccaggcattattggtctgatttttttaaaagcatttgtgacactattttgattttgacaatttcacatatatgtgtgagtgtacgtgcatatttattatatgcaatatgtgagatacagcatatataaatgatatatacaagtatacatatattacacattgatatatatacacatatgtgtatatatactatgtttaaacacatttgtgtatatatataatatgctcatttatttacatatgtacatttataacaatacattatacatacaccatagcaatacctgagaggaactaaataatgatacctctctttcctgcccagggtcttaatcaattgagaaataaatgacagaaactgaacgctataagccaggcatggtggctcacacctataatctcagcactttcagaggacgaggtaataggattgcttgaacccaggtgttcaaggccagcctgaggaacatgtcaagaccttgtctctgaaaaaaaaaaaaaattagctgggtgtggtatgtgcctgtagtccaagctactcaggaggctgaggcaggaggatgctttgagcccaggagatcaaggttacagtgagctatgatcatgccactatactctagcctgggtgacagagtgagaccctgtctcaaaaaaagaaaaaagaaataaagtgaaggctctaacaacgtctttattgttgataaacacagttgaagaatatagctttgtgtgagaaaccaaagagtcacctaactgaatccagaattagaattatgcagatgtatccatccagccacaagcaaatctggccctggggagatcaagctccaatagaaaatgtactgcccctggagaaacagtgtggaactcaagccttctgtgagtaggctgcttcccaaagaagagaaaggtagaggccgagatgagcatgccaagtttagtctatacaaatttacatatggatgtaattattttgtaatatatgtataattatactacatatattatcatattaatattaacataattatgtaattctaaataaatattatgctgtggtgagtcaacctagtaaaaaataaattctcaagaaattagttattttaattttcaaaccaaattattaggatataagacaaagcttaacctttagacaaatgtccatggtaacaattctgctccccaaaaccagtgtgtagtgttgtcaaagcccatctcattggtgtctgaggaacaaaggcagatggtagacggtgaaaatctgaacttcaacttacctggtttatcagccagcctatttacatttctggaatcgaccacctgtgaacttaattgataggagcctcctagcaaatgataaatgttttcaccatgaatttgccatgtgtggggtggggagggggctgggaatccagttgcctcctccctgtctcctccaccagactctctcctccatcacagggcaatgttcagacaatgctgtcatctttatttgtagtggcagcagactttaccaggggttataagaaaattttttttctttgccaacctatgctaaccttcttaacttccatttcctttggagcattgcagtcccaaggatgagctgtgagtagcactgatcccaaggcattctttgagcctgtgtacattggtactcttcttttgcctgttgaaagggaattgatttggcctaaaaaagtcctgtctcctagaaaaggatctcactttagagccacatttgtttcaactgctactgaggctgttgaggctggcgctcccagtaagggccagtgctttggtcaggtggccctctgaagtttagacaattaactttcttttctgtttcataaatttcttgggcacagtgaaacccatgtgcctagctacagtaactatcattttgaaactcattacaatgttctttagtattttcttttctctctctctttttttttttttgagatggagtctcactctgttgcccaggctggagttcaatggtgcaatctcagctcactgcaaccgctgctgcccgggttcaagcaattcccctgcctcagccttctgagtagctggaattacagatgtctgccacagtgcctgactaatggggttttaccatgtctgccaggctggtcttgaactcctgaccttgtgatccacccgccttggcctcccaaagtgctgcgattacgggtgtgagccaccgcgcccagccagctttagtattttctattacagtattgaacctttagaccaaaaataattggcccagatgcatcatttaaggtcaagtgctccacagttccaacctgtgctcttaattcagaatggagtgctacctactgccacctgaggcaagacaacatagaaactacctagtgttctgttgctcagatgtaacattgcactcttgctttgtacaggcaggtaatgatcccactttagcctaggcagtgataccaggccaagctgtgcctacatcctaataaactatagccgtctgcttgccgcctgaggccttagcacctgacaaagaaactgccttggctgaggcccttgccttgcactgcaaattcaaggtcaaactgcaacaatctgcactctgaagccatctgtgctggccatgcctttggccctacctctacagaaagtcatctggggtcagaaccacaatacattgcagccactggacaaagtcaaaaatacctagtgacctagtaatacctagtaatgcttaaggactcttagctaggtcttagcaaatgaaagctaactgtggaaagtaaaaacctttctggcctagtgtaatcttcacaaaccacccatgtcaacattttctgctccaatactaaggttgctaaagaccaaagctgcttcagaagttttgttcattccacatgcaatttgctttctgaatttttcttctctcccagtgttcttagtcattgtaccaaagatgaggtctaaacacacacacacacaccgcaaacatacacacatatttatgttcttctttcacatgtaccttttcatgacccttttcatcctccaatctggctatccagaagcaaacatttttaactcttttagctgattatttttggttttctttccagagccctaagttatatcttgtattgtcatttttttgattattcaattttagaaatacttattctttcatctcttattcgaccaatttcctagtacaatcaaatgcctgctttaattacattaacaaactatgtaaatgtaatttacttgaaagccaaatatcttatgcttgtgcagctttttcatttaccaaaagtttttaattttttctttttacccattgtatctctttattccaatattatatttaaactgttcatcttttcaggtattgtataaaactttctttctttttttcttcttccactggtcatctggacaagttcctttttaggtttgcttcaaggtggttatccagaagttcttgttcgttaggctatgtttcctggaactcaagtctttgtttttcttggtttacacactcattttgctagagcaaagagtatgtgagaagtgatatttctgaaaacttgtatgtctgaaaatgtgtttagtttagtacaaatgtttagcaaaaatgtttagtacaaacatttgaatgacagtttcgtgtgacatggaattttagtcaaaatatatttcacgcttctgaaatctttgctctatgactatggagtatccaatgttgttgatgagaagactggcgccagtctgatcatacctctgtagatgatgtatctgtctctctcaaaactattaggaccttgtctttattcctttggttctaaagttatagtctaggagtgggactttttcatttatttatttggcacatagaaatgcttttgatctggagacttatgttctgcaactccagcaaattctctcgaatgattctttgatattttacaacctctctttcctatgccctctcattacaaattgctatttactacattaatatttattactccctatccaataacgattttaaaactgaggtataggtacttgctctggattcacaatcatcttgagtttaatctagatacactctcaacaagtccataagagtcaaatcttccagcctcccctgaggctagaggaaaggtcatagaacaagcagctgaacttctctcagaactaactcatttagagacccaccttcttatttagtaggtgtagctacccgaataatttaggtaaaatttccaaggttttaccaccagttagtggcagagcctggattagaattaaaggattctcatatcttagtcaatgttccttttccattacataatgtttttcttgtctgcaatagcccagtgacttgaaacacaaattcacagatcctaagaacaaacctaatgggtgtggcttctaaaaattattccatggacttttatgaaaacaaacaaacaaaaagtggagaagggctgtggagatggtagaaactgcagacatcttccaggaaagggcattttaagattccctcctgccatacaatcacggcgacaacttctactgcaattgctcataaagccatttgctaagatacagtggttgttatatattttaaatatttactttaaatctaacattgcttccttgggaaattgttattaaagatttgtttaaattatataaaacattaaacacatatagaaaatatttttactagattacggttcttagactaagtgttaagactgcattctagctaccatacccaataggtatgctactatagagaagttggttaaattctgagagtttcttcatcagtaaaatgtgaaaataatcacaatgttattctaaacattggatgaattatgcatacatagtatcagcccagtggctgatacttggaatgtgcttatgaaaatatgttaaaccagtgaatgttagtttaccaagcagggcatatgaactatatataagattcctcatgcatataattgtttgacaaatatgtccattaaatgtgaaaaaatctggagaactttatggaatttgaatagtattatctcagttgacttacttataagcaagtaaaaaagaagctgtgaatgatttatataaactgagagaatagttcaaggacacgtgtcatttctgatgctgttattttgtattaggctagagggatgtcttccctgaataaaaataatagttttttttttttacaaatcaaatatacaaaagattatgaaatatacatatactcaaaatatactgtaataattgatcatcggtaataataaatgtttaaatgcataatatagataatgctcaatatattcatttattcaattgattagtcatttatttgttcattttttcatcgtatatttattgaattccaaatcaatattactgaggctttgaagagaaagtcactgcccactggggcagtcttatctctatcacctaattcatttgaaacaaatagaaaacagtacaggaaattagaacagatgtaggtgaatgtcctttgctatttttacctacaacatgtctcacttcagactacccacttttcaagtgcttaacaggcatatgtggctagtagctactataatagacagcacagatataaagtcatagtacttactgcatcctaagtattttgtataatgcctagaacatatttataattttgctccaataaaaatgtataaaatgaatgaattaattaataatcaatttagtcaaaatagttgtatctgtcagtactatttagcactagttagcacttgttggttgcaagtgagaaaaatctgactcaaaattatttcattgaaaatgagtaattgggccaggcgcggtggctcatgcctgtaatcccagcactttgggaggccaaggcaggcggatcacaaggtcaggagttcaagaccagcctggccaatatggtgaaacactgtctctactaaaaatacaaaaagttagccaggcgtggtggtgggcgcctgtagtcccagctactcaggaggctgaggcaggagaattgcttgaacctaggaggtggaggttgcagtgagccgagatcatgccactgcactccagcctgggtgacagagtgagattccatctcaaaaaaaaagaaaagaaaagaaaaagaaaaggagtaattgaatcattcacataactgaaaagcctactggatccaaacacttgaaagaggctgataggcaatctcatctatcctgtatcccctgcccattacaaattccttgccatcttttggtttagctttacttagccaaccattattggctgggctgctgaccatgctacatgtcctacatgaattatagttacctggttaccccagtgagggaggctccctattgttgcattcttcaatcaacttggagagtattatgactcaccactggttcttaaacatctgcctgtaaatgataactataaccaatgctcacatttccttggccaagcaagtcatatggtcacacctcacctcaaagagtaggaccaagaaagacagtgttgccatttgccccgaatgctgcaaaagtggaaatgtagaatgaatagcctaatgacttccacacttactattagcttcattctctggcaaaaatccctgagagttaagttagttagttcctgattcatatccttccattttagtaatttccatagaaataagtattttttgcccagtggtttcaacaaaattcccctggttggatgaaagagaatttgagatgaactctaatagtttcctattatggctgtataaatgaccacaaacttgcttaaaataacacaaatttattatctggaggtcattagtttaaaatgggtatcactaggctaaaattaagatgtcagcagtgctgcattctttctggagggtctgggagagtatactgcattgaatgattatctccaaaatgatatattcgtaccctaaaccttggaacctgtgaatgtgaccttatttggataaagggcctctgcagcaaccaacatatgagagacgtgtctttatggcagaacaatttatattcctttgagtataaacccaataatggaatcgctgggttgatggatgtagtagttcattctcacactgctacagagaaatacctgaaactgggtaatttatagagaaaagaggtttaattggcttatggttttacaggtggtacaggaagcataatacctgctgcttctggggatgcctcgggaaacttacaatcaaggcagaaagcaatggggaagagataggcccatgttatatggccagagcaggaggaaaagggagaagatggatgtgccatacacttttaaacaattggatctcttgagaactctatcacaagaacagcactgaagggatggtgctaaaccattcatgaaggatccacccccatgattcagttacctcccaaaaggtcccacctccaacactggggattacagttgaacatgaggttcaggtgaggacacaaagctaaacaatatcaaatagtaattctattttaagttctttgagatagctccaaactgcttttcacaattgccaccagcagtgtataagtaatcccttttctctacaacctcactagcatcttttattttttgactttctaataaaagccatgttgactggtgtaagacggtatctcattgtggttttgatttgcatttctctgatgattagtgatgtgaagtgttttttcatgtttgttggtagcttgtatgtcttcttctgagaagtgtctcttcatgtttttgcccatttttaaaaattgggctatttgttttttgcttattcaactgtttaagttatttatagattctggatattagtcctttgttggatgaatagtttgtgaatattttcttccattttgtagattgtctgattatgatgttgatagtttcttttgttgtgcagaagtcctttagttcaattaggtcccagttgtcaatttttgtttttgttgcaattgcttttgaagacttaatcataaattcattcccaaggttgatgcccagaatggcatttcctaagttttcttctaggattttacaatttgaggtcttaacatttaaatccttaatatatcttaagttaattttggtaggtatccatcccctcaagcatttatcatttatgttacaaacaatccaattatactatttcagttatttttaaatgtataataaaattggttgggtgcagtggctcacgcctgtaatcccagtactttaggaggtcgaggcgggaagatcacctgaggtcaggagttcaagaccagcctggccaacacggtgaaaccctgtttctactaaaaatacagaaattagccgggcatggtggcaggtgactgtaatcccagctactcaggaggctgaggtgggagaatttcttggacccaggaggcagaggttgcagtgagccaagatcgtgccattgcaccctagcctgggtgacaagagcaaaactctgtctcaaaaataaataaataaataaataaataaataaataaataaataaaaataaaaaggctatcatttatcatattcattttaaatgaaagttaatttgggctgcactacataataggcaatagaaatatacagaaaaaaataaataactagaatggtagaatatggatttatggccagatatatttgaattaaaaatccagtttttgccatctgactgactatgaacaaatattgtaatctctctggccttaacttcacctcaaaattggggtgaatgtttgctttataagcatattgtgatatgatttacataatgtactttacacattgcctgaagcccattagggtctaatatttggtgatgtttatatttttgctattttcgcttatggctagatcatatatataaatgtaggagaaagggtaaaattaaagataattatctttatgtttagctttgacaaccaacagtatgatctcactaataatgcgtggaaatatagttttaataattggcttaatgggaaagagatgataagtttggtttgggccatactgaatttaatctacaagtaagagagtcatgtgaaaataatactcctgacaaataaaattctgtttttagaattttgagagccaagtaagagtcatgaaaccaagccattgattcaggaaggaaaatgatctagacacttgtagtaaaagttgcagcaaagtctggactaaaaggtcagtaagtcagagtattttatcttcttatgaatttcagtatccagctattatcctgctagagcaggaaatgaccccatcctgaggcttcctgaagaagggcaccaatgaatttgcttaactttgataatgacataggataaaaaggaagaaagtaaggcaggatggaagggaagggggcgaagtctgaaaattcaggagaatgcatcgaaataataacccaaagatcaagtaattatgtctcataacccagtgcctgctaaataatgagaaacgtgtatttgggataatatatcaaaattttaatcttataaaacaatatcaaaataaagagcatttagacagtaactatctggagaagtattgaaggacacaattatagtgttcttaatgttagaattagctgggttgcttaattttttttattgaaaatgatgtaacaaaaactcccagagatatacatttgctgaagagctttctgtgactacaaattgcctcctcctaattgttatggaaagtacattaaaataatagagtcaaggtataattaagaaatagcagaatctaggccaatacataagaccccagagctcaatattaaataaaatctctattgtttttcagagtgtgggggaccgtagagatgaaaacaggcaagaaaatacttggtttttctcattttcacttgataattattaagagtcatcaaacaagagtgaagaaataacttcatcagatgtaacaaaccagtgggctattctgaagacaggccaaagaagcagaatgaaagagagtcaaaggaatttattctcaatacatctctcataatccattaaaaaataagcaaagaaacttaccgaggccagcttggttgtggagaccctaacccagtggtgctagaggaattaaagacacacatacagaaatatggagtgtggaatgggaaatcagggggctgacagccttctgagctgagagccacaaacagatttgcccacgtatttactgacagcaagacagtgataagcattgtttctatagattataaactaactaaaaccattccttacgggaaacaaagggatgggctgaaacaaagagatgggctctggctagttatttgcagcaggaatatgtccttaaggcacagatggctcatgctattgtttgtggcttaggaacaccttaaacagttttcagccctggctgggccaggtgtttcttgccctcattctggtaaacccacaaccttctgtgtggacatcatggccatgaggaacatgtcacagtgctgcagagattttgtttatggccagatttggaggtctgttcccaaaatgttccccctttttgtttttgcaagatgataaaagcaaaggtggatttatcacagtgagctacttcttgcaggagtcgggattcgcatctgcagactatacaaagacaacacagattaaaagcacaatcatcattgaaatcacagagcctccaagtgttgttatccatattaatgggttactagctcctaacctgtctgcagctccttcaaggactccagttcctggcattaaggtcaggtgtgcctgggatgctttaaatatttgttcttttaattttgtaatatccaaagacaagtttgcagagggtccttctagatgcttttttattcttttccaaattttgatcttattatgagccattaatagtttccacaaatccttaagtttagctcctacagcaggccacgtcatttgaggttgaggtgccactatgtcgccatgtttccaggtaataggaactcttgtcagatttcttaccatttctaccatctgaccattttcttccaaccagctgaacatagtgtggctgtggcacgcagactgagaggtgcaattcaagccaaacatccccttaggggaccaatcaataatgattccataggaatcgttgcacagcacctctgcctgttctgcaatgcaatcttcccaaacaagtacattcattttttctggccaggtccacttctgtttatgaataagtttttgaaggcagtatgcctcaattataggagcagatttattatggtaaatactgagatcagaaaggatgtgtaaatgtgtcatagaatgtttacatccaggcattattgccagccacgattgataaatatgcccaataaatagaattgttctctgtgtcagcctttgctgaaggaatactcgtggcaatggtgatcaccactatcacagctatcattaaattactcattgttactggttgtcccactttcctcaggttttcttccaccatctgtgacagcttcttgatttgtccccaggtgggtggctgtgttcgacgggtgttgctcgtgacagttggagtcctcctcagtgtcagtctcaacatggctgcaaccttagggtcctcgggatcctccaggaatctcttccttggcatctggttcatgataaggtttcaggtgtcttgatggtatccaaatcagctgctggttttggcctggagaaacacaagcataacctcttccccaagttattatgttacctatttcccaactttttgttatcggatctctccaccaaaccagttgttctgcctgtgtctttgcagctggtttctgtagatgctgttctgctgctgatagaatctggcctttaggtaggcttaacaatcaccatcatcaaaaatgatatcctaaaccttggtgggaactttgtcttcccacttgaagtggttccttcaaaccttgaaaattttttcctagtcccgtaccagggacataccccatttcaggcatcatatgttgactttgagggctatataattgctctggaattagaatttgtgctccccattgttgtgataaatctctcccccataaatttaaaggtacagaagttacagttggttgaatagtcctaggttgtccatcgggcccttcacaatgcaaaatataactgctttgatatacttcaggggctttactaactccaactacgttaaattgagtgggttgaattggccacagagatggccagtgctgtagataaatgattgaaatgtccactcctgtattgaccaaacctttaaatttctttccctgaatagttatttaacaggtaggacatttatcagtaatttgattcacccaataagctgctttgccttgtttatttgtgcttccaaatcttcctgttcatttaatttcacttttccccatttccacatatggcacaatcaggagctgtgctatacgctctcctggctctgctttccagggaacagaagtagatataacaatttgaattttcccattgtaatctgaatcaatgactcctgtttgtacttgcactccttttaaatttaaactagacctacctagaagtaatcctatcatcccctctggcaacatctgacgggagacagcaacattttttaacagtcccattacaaaaggagaacctggtccatattgattaatagcttgtttaaaatctttgagtactttaaaaggaaaatctcaaatgtagctataatatttccctgttgatcaggtgggtgtattctaacagggaactgccaagcctttaaatcaccctcttttctagcttgctggattcctgcctgaatagaactgaaagtggtcactcgagacactgctcgaacagtcacggggccagctactttttgcccagtgtccttcagaaaagaaagatctggaaggtcaggccactctttttcttcaaaataaggagggggtgcagaagggtagggatgaacctcttcctcctttgccactttagctttagctggcaaacaaacctgctgtgttacctcttctgttagtttgttatacttcccttcctcctcctcatcagtatgaaaagcttccaaagtggatcgaaccagagcccacacttgtcccattgttaccctgatgcttccaagctccccttcttattcaccacggggattgcttaagagtactcaggtgtcctccagcttcatttcacattctccaaccatcgctctggtgaccctttgacctgggttcgagccccacatatgggcatgacttgctgagaccagcacagttgtggaggccctaatccagcagtgctagaggaattaaagacacacccacagaaatatagagtgtggagtgggaaatcagggggctgacagccttctgagctgagagccacgaacagagatttgcccacatatttattgacagcaagccagtgataagcattgtttctatagattatagaatagctaaaagcattccttatgggaaacaaagggatgggccaaaacaaagggatgggttctggctagttatctgcagcaagaatatgtccttgaggtacagatggctcatgctattgtttgtgacttaggaacaccttaagcagttttcagccctgggtgggccaggtgtttcttgccctcattctggtaatcccacaaccttcagtgtgggcatcatggccattaggaacatgtcacagtgctgcagagaatttatttatggccagacttgggggcctgttcccaaaagaaactaaattttgaatggaattaccattaatatatattggggttttatgggaataaaatatcataggtgaattaaaattaatagataataaaatttaataataaaaattaaatttatgtaaaatatgaaggaataaacattcctttttctaatatacttcttcataaaaggataaaagtagactgattattatgttatcaaatatttaaagataaaatgtttgtacattgatagtcattgggtattcgctaaaacacttttcaaaagcttcataatacaaacgttagaatggtaaactgtgtctttctggacatagattactaaagttatatagacatatataggcctagggatgacaatttttataaccttagtacagttggatcttgaataccatggtggttaggggcattgacttcctgtgtacctgaaaaaaaaaaaaaatatatatatatatatatatatatacacacatacatatatatatataaatatacatacatatatatatacatacatatatatatataaatatacatacatatatatatacatacatatatatatatatacacatacatatatatatatattctacaatggaaattagaggtttcacataaaaatcagctctctgaactttaactcaagaaggaaaagagaaatccaccaaaatcagaaaaaaagccccaaaccctggggaggagatgcaggcaaatagcccccttgacagcatctggctgataaaagtgagtaaagttccagtacacgtgagaggcagagagcctccctctgtgacttacctttccactggggatctgagcaacccaggctgagggagagcactttgtttcccccaagcccaggactattttgggaagagacttggaggtctgagagagaaagagagtgagaaaagctgcaggcatttcccatggaccctcaggactaagagcaggatgccattctgaatccaggttaaaacagtcagccattctttggtgacctggcagcatggccctgcaggcatttcaatcgtagactagagattggagcacttgctctggagtggagtaggggcctccacaaccagaatcataaagagctactcagcagcagtcactgcagttactttcttccccatcccaggcctgggttggggagagggctgctacagctacagtttttgctgggtgatttgaagccagagccaccttggtgacctggaactggtctaagtgagtcactgctgggtgtcccagcctgctcccctgagattatggtgcaccagggccccctcctctctgtgcctaggaagatctccaagcatttggagcactcattcacattgactagcaatgcgagacaccccatccttcttgtgcagagtcctctccaggccatgcccaagcatattcccaggtattcagagcacccattctgctggatcagcagcttgccccagcccactctccttgtgcagagatcctggtgcagggagtctctctccactttatgtttaggcaagtctgtaggcattgagagcaactgctcacctggttcagtagttccaccctacttgccctggatatagattgtgatgcagcacggccctctctgttgcatgcttagactgatcttcaggtagtcaaagtacctgctcacccagattggtagcttgagccactgtaccctttttgtgcagagatcctggagcagagattgtggtgcagcagcaccctctgcactacccactcaggcagacctccaggtacctggagaacccactctcctagattgagagtttaggccagcctttctaatcatgcagaggacttggagctgagaagatttatcagctcaatgcctaggtgcacctctgggtgcttggaggccacccattagattcttctttagcactagtgcttgtgcctgtcatcaagggtcctgcaggtgggcatgcctagtctggacctgcccatcatagtcctcactccccagggctgaacagggagctcaaaccactgtgcaatccacagatcagtccattgcctgaggcaacagagaccttctctcagtaaacaaggctcaggtatatacccagccatattagccccatccagttcttatccataaataccatctactggcttgtaggttggactgcaaagataagtataaaacccaccaaaagaagtgcaaaagcaaaaagaccttacccaacattctctaccttacccaacattctctatagtcacaccccctagggagggggaaaagggaaagagaaagagacagaaaaccactaagtttataaagaaataaagtaaaagaaaaattcctacctgtacaaaaataattacaaaaatcagaagtgccagaatctccagataagaagaaaccaacacaagaattatggcaccataaaaattctgagtgtagtgacaccacgaaaggtcacactagctctcctgcagtggtccctaaccaaaatggatactcagacatgagagataaggaattcaaatcttttttttttatatgattgttgccacatgtatgtctccttttgaaaaatgtccattcatttcctttgcccacttttttatgaggttgttgttttttttttttttttgtaaatttgtttaaattccttatagatgctggatatcagacctttgtcagatgtgtagtttgcaaaaattttctcccattctgtaggttgtctgtttactctattgatagtttattttgctgtgaagaagccctttagtttaattagaccctgtttgtcaatttttgcttttattgcaattgcttttggcatctttaccatgaaatcttttcctgtgcctatgtcctgaatggtattgcctagtttgtcttcctgggtttttatagttttggattttatatttaagtctttaatccatcttaagttaatttttgtatatggtataagaagggggtccagttttaatactctgcatacagctagtcagttatcctagcaccatttattgaataggaaatcctttcctcattgtttgtttttgtcaggttagttgaaggtcagatagttgtagtcttattttgtggttctgtattttgttccattggtctatgtgtctgctgctttgtttactgtagccctgtaatatagtttgaagttgggtagagtgatgcctccagctttgttctttttgattaggattgttttggctatttgagctcgttgttggttccatattaattttaaaatggatttttctagctctgtgaagaatgtcaattgtagtttaatgggaatagaattgaatctgtacattgcttgagcagtatggtcattttaacaatattgattctttctatccatgagcgtggaatgtttttccacttgtttgtgtcatctctgatttctttcagtagtggtttgtagttttccttgtagagatctttcacctcccttgtaaattgtattcctaggtatttttttctttttgtggcatttgtgaatgggagttcgttcctgatttggctctcggctttactgttgtcagtgtataggaatgctaattatttttttcacaatgattttgtatgctgagattttgttggggttgtttattagctttaagaagcttttgagttgagacaatggggttctttagatataggatcatgtcatctacaaactgagatagtttgactttctctcctcctatttggatgctctttatttctttctcccgcctgattgccctgagcagaacttccaatactatgttgaataggactggtgagagagagggcatccttgtcttgtgccagttttcaaggggaatgcttccagcttttgtccattcagtatgatgttggttgcgggtttgtcatagatggttcttcatatttgaggtatgttcctttaatacctactttactgagagttttgaacatgaatgaatgatgaattttattgaaataattttctgcatctatttcaaaaagatgtgctgctggatttgctttgccagcaccttgttaaggatttttgcattgatgttcatcaaggatattggcctgaagcattccttttttattgtatctctgccaggtttcgatatcaggatgatgctggcctcatagaatgagtgagaaaggagtgccttctcctcaattttttgggagtagtttctgtaggaatgatttcagctcttctttgtacatttggcagaattcagcagtaaatccctttggtcctgggctttttttgttcggtagactatttattactgccttaatttcagaattcattatgggtctgttcagggatttaatttcttcctgattcagtctttggagggtgtatgcaatcatgaatttattcatttcttttagattttctagtttatgtgtatagtggtattcataatattctctgatggttgtttgtatttctgtggggtcagtggtaatatcccctttgttgtttctgattgtgtttatttaatcttttttatttattagtctagctagcagtctattttcttagtttctttttttttttttaaagaaaaaaacaaacagctcctggattcgttgatcttttgaatggttttttcatgtctctgtctccttcagttcacagttacagttcacctctgattttggttatttcttgtcttctgctggctttagtatttttttgctcttggttctccagattttatagttgtgatgttaggtcattaacaaaatctttctaattttttatgtgggcattcagtgctataaatttccttcttaacaacatcgcttatcattagaaaaatgcaaatcaaaaccacagtgagatactatctaacaccagtcagaatggctagtattaaaagtcaataaataacagatgctggcaaggttgtggagaaaaaggattgctggtgggagtgtaaattagttcaaccattgtggaagacagtgtgacaatttctcaaagacctaaagacatatataccatttgacttagcaatctcattactgggtatatctgaaaggaatataaattattctattctaaagacacatgcatctgtatgttcactgcagcactattcgcagtagcaaacatgtggaatcaaccgaaacgctcatcactgatagactggataaagaaaatgtagtatatataccatgggatactatacagccattaaaaaataatgagatcatgtcctttgcaggaacatggatggagctagaggccattatccttagcaaactaactcaggaacagaaaaccaaataccacatatcctcacttataagtgagaggtaaatgatgagactacatggacagatagaacagaaaaacacacactgggcctattggagggtggagggtgggaggagggagaggatcaggaaaaataattcatgagtactgggcttaatacttgggtgatgcaataatctgtacaacaaaaccccatgatacaagtttacctatgtagcaaacctgcacatgtactctgaactaaaaaaaaagaagtagaatgattgtttgcccttgaagttatattgttgtcagttttaattcaattgttataacttaaaaaaataagaatttgaagcacagattacaaggaagcttgacaagatccaaaacaatgttgaaaatcaacacaaagagatttctttcctttttttttttttttttttgagatggagtcttgctctgttgcccaggctggagtgcaatgggatgatctcaactcactgcaacctctgcctcccaggttcaagcaattctcctgcctcagtctcctgagttgctcagattaaaggcacccaccatcacatccagctaatttttgtatttttagtagagacggtttcaccatgttggtcaaactagtatcaaactcctgacctcaggtgattcacctgcttcggcctcccaaagtgctgggattacagatgtgagccaccatgcctggcctaacacaaagaaatttctaaagctaatcaagaaataaatgaagaggtgaagatatttaaaagaaatcagttagactttatggaattgaaaaactcatttaaggaacttcaaaattcaattcgaagctttctcaatagactggaccaaatagaagaaaaaaaattcaaaactcaaaaactggtctttccaactaacccagtcagacaaaactaagaaaaaaaataattttaaaaatgaagaaattcttcaagaaacattggattatataaagcaaacaaacctatgaattattgtcatttctgaaagaggaggagaaaaagtaaacaacctgaaaaatatgtttgaggaaataattcaagagaatttttctaattttgctagggaagtaaacattcagatacaagaaatattatacaagacaaacatcaccaaggcatatagtcaccagattgtccaaggttaactcaaaagaaaaattcttaaaatagctagagaaaaaggccagatcatgtacaaagggaaccccatcaggctaacagcatacttctcaacagcaaccttacaatccagctaaccttacaatcaaagagactgaaagcctattttcagcattcttaaagaaaaaaaatctaaccaagaatttcatatcccattttcataaaagaactaaagcttgtccagagaagcaggcacaaagggaatttgttaccactagactagccttaagagagaactttaagggatttctaagcatagaaacaaaagaatgatacatgctaccacaaaaactcaattaagtacatagctcacagaccctataaagcaaccaaacaatagaaactacaaagcaaccagccaacaagttcataataggatgaaaacctcatatatcaatattaaccttgaatgtaaatggtttaaatgccccacttaaaaggcacagagttggaagttttgtctgtgtgtgtgtatgtgtgtatatatatatatatatatatatatatatatatatatattcatatatataaagaccctttcgtctgttaccttcaagagaccatttcacatagcctcaaaataaaaggttggggaaggagctatcatgcaaatggaatacaaaaaggagcaaaggtcactcttcttatatcagataaaacagaccttagatagtaaaaaaggataaagaaagaaattacataatgataaagcattcaatttaataagaagacttagctatcctaaacatatatacaaccaacatttgaggactcagattcatacaacagcaacttctagatctatgaaaagactcaaacacactataatagtggaaaacttcaacacccaaatgacagcattagacagatcatcaaggcagaaaactaacatagaaattctgttcttaatttcaacacttgaaccaactgaaactaatggaaatctacagaatactccacccatcaaccacagaatatacattattctcatctacacacagaacgtactccaagattgaccacattttcagccataaagcaagttttaataaattaaaaaaatttaaatcatactaaccatactctcagaccacaaaggaataaacatagcaatcaatacaaagaaaatctccccaaaccacacaattatctggaaattaaacaacttgctcctgaataacttctgggtaaacaacaaaatgaagtcagaaaaaaaatatttgaaataaaagaaaacagagacacacatagcaaaatctctaggatgcagacaaggagtgttcagagaaaaatttataacaccaattttctatttcaaaaagttaaaaagatttcaaattaacaatataacactaaacttaaaggaactagaaaagtaagaatgaacaaatcctaaagctagcagaagaaaataaataactaaaatcagagcataactgaataaaattgagacacaaaactccttggaaagaatcaacaaaaccaaaagctgattttctgaaaagataaagaaaattgatagactgatagctagatgaacaaagaaaaaatagtgaagatccaaataagcacaatcagaaatgacaaaggttgttacaaccgatggcacagaaacacaaaaaaatcctcagagaatgttataaacacttctaagcactctgatatcatgtggatgtttgttcccgctaaatcccatgttgaaatggaatcctcagcatgtagggcctggtgggagatgattaggtcattggggcaaatccctcatgaatagcttagtgctgtctttgtgatgagtgtgttcgcactctgagttcatgtgaaatctcattgtttaaaagagtgtggcacctcctgctctctcttgctcccactctcaccatgagatacgatggctcccccttctcctttgaccatggttgaaagctccctgaggcctcaccagaagcaaagcagatgctggcatgtgctttccatacattctgcagaactatgagccaataattctttctttctttataaatcacccacctcaaatatttctttagagcaaagcaagaatggactaagacacacgcaaaatagaaaatctagaggaaatacataaatttctggaatttataatttcctggaaacacacaacctccgaagattgactcagaaagaaactgaagccctgaacagaccaatattaagttccaaaactgaaccagtagtaaaaaacttaccaactgaaaaaaaaaagcttcagaccagatggatttacagctgaattctgtcaggcatacaaagaactgctagtaccaattctgctgaaactattccaaaaaacttaggggaagggactcctccctaactcattctaggaagtcagaatcaccctgacaccaaaacctggcaaagatgcagtaaaaaaagaaaactataggccaatatcccccaatatccctgaaggacttagacacaaaaatcgtcaacaaaatagtagcaaatcaaaccagcagggcatcaaaaagttaattcaccactatcaagtaggtttctttcttcttatgtaaagttggctcaacatgcagaaatcattaaatgagattcaccacataaagagaatttaaaacataaaccatatgatagtctcaatagatgcagaaaaaacctttgataaaatccgacattctttcatgataaaaaccctcaagaaactaggaaagaacatacctcaaaatactgagagccatctatgacaaactcacagacaacatcatactggatgggcaagagtgaacgggcatttcttttgataattggaacaagataaggatgcccattctccccactcatattcaacatagtccttgaagtcctagccagagcaatcagacaaaagaaagaaataaagagcatccagataggaaaaaaggaaggaaaactatctatcttcagtgataacatgactctatactgagaaaaccccaaagactctgccaaaaggctcctggaactgataaatgacttcggtgaagttttaggatacaaaatcaatgtaaaaatatcagtggcatttctatataccaataacattcaaactgagagcaaaatcaagaacacaatctcatttaaaatagtcacacacacacacacacacacacacacaatatttaggaatacatctaaccaaggaagtgaaagaactctacaagtagaactgcaaaacactgctaacaggaattgtagatgacacaaacaaatgaaaacattctatggtcatggataggaagaatcaaaatcattaaagtggtctatactgcccaaattgatctataaatttaatactatttcatcaaactagcaacgtcatttttcacataaatagaaaatctattctaagattcatatggaaccaaaaaagagcctaaataaccaaggcagtcctaagcaaaaagaacaaagctggaggcatcacattacctgacgtcaaactatattataaggctacagtaacccaaacagcatagtactgctacaaaaacagacacatagtgcaatggaacagaatagagagctcagaaataaagtcacattcctacagccatctgatctttgagcaagttgacaaaaataagaaatagagaaaggaattcctattcaattagtggtgctggaatagctggtgagctatacatagcagaatgaaactgaacccctaccttttaccatttacaaaaattaacttaagatgcattagacatttaaatgtaagacctcaaatgataagaatcctacaagtaaacctaggaaacaccattctggacattggccttggaaaagaatttgtgtctaaatactgaaaaccaattgcaacaaaataaaaaattgacaagtgggacccaattaaactaaagagcttctgcacagcaaaagaaactatcaagggagtaaacagacaacctgcagaatgggagaaaatatttgcaaagtattattggataaaggtctaatattcagaatctataaggagcttaaacaattcaacaagcaaaatcaaataattccattaaaaagtatacacaagacatgaacagacagttctcaagagaagacatactattaatagcagcgtgaaacataaaaaatggcttaacatctctaatcatcagagaaatgcaaatcaaaactataatgagatatcatctcacaccagtcagagtggctattattaaaaagtcaaaaaacaaaacaaaaacaaaaacaaacagatgctagggaggttgtagagaaaaggtaatgcttgtaaactgctggtgaaaatgtaaactagttcacccactatggaaagcagtttggagatttcttcaagaacttaaagagaactgccattaggcttcaggaatcccattactgggcatatataaatgaaaacaaatcattctaccaaaaagatgtatatacttgcatattcattgcagcactattcgtaatagtaatgacatggaatcaacctaggtgcccattaatgtagattggattaagaaaatatgccacatatacagcatggaatactgtgcagccatagaaaagaattacgtcatgtccttgtcagcaaactggatgcagggggatgctattatcttaagtgaattaactcagaaacataaaatcaaatatcacatattctcacttataaatgggagctaaacattgtgtactcgtggacataaaaatggcaacaacagaaactgggggctactagagggaggaaggaggaagtggataaggtttgaaaactaactgttgggtactatgttcatcatctggatgat

SEQ ID NO: 512 - DNA, 25809 bp, Homo sapiens
agccaagatcgtgccattgtactctaacctgggtgacagactgagactccatctcaaaagaaaaaaaaaaaaagctttatacggtctgaccccccccagtaggaagaacacatgggtctggaaaccaaacggcataagtggccttatcattgctcccgaagacccagcagtggaccttgtgtttcctagtcctgcaactctgggctctgcagggctggaggtcctgatccccaaggaatcacacttttgccaagggacacaaaagtctcagtggattatgagttgcacctgcaacctaggcacctccggctttttgtatgaccctgatcagcagatcaggtgcacctcagctcctcaagtcactccttgtgccatttgtgatgccaactggactagtgtatcctttctggcctaagaaggacatgatgaccagggacacagaccccccagggatgagggctgaccaccccaccaggtaagcccccaagaccagcaaagatggtggctgggcctgcggctctccgggacacagggtgcaggtgaggatgagcatctgctgtggctcagggacagcggcggcagcaggagttgcaggtcttccttttaacctccctctcctcactttccccagaagagaggtcagcagcaagctggagggcctgtttcttggtgtccatggagaagtctatccgagcagtgctgagatggatgaaagggaacacagaggtgcccaaccaggcccccaacgaaggacatagccagctgctgggagctaacagcagatagactttagccagagttgtattctggttggcctcagctgtagagaactacctcacccacttggatacccttcttcacaggatccaaaatgacagatagtggtgggagcagacagggtcggccatgccggcgcaccccaggatgactgacccgccaggtgctctgcagctcccatggctggcaaaggttgtgtggcagtttggcttctcccgctgcccagtcctgtttcttccttccccgtcttttcacagaggttgatcccaatcagtatcctgcaatcccaaatccatctccttgtctgccttctgagtgtctagacagcactgatgactatgtatgcaacatgctcctacacacttagaaaactctctggacaaatgcacaccaaaaaactggttcgtctcgggggagggtaagtgggtagcttgggacagggagtagaggggaatgtactttttatcgttttccccttttggatcatataaatttttgtacaataaacatgtatttcactcaaaaacaaaaattttaaaagtccaaagaaaagaaggtctaaattattagtataagttattgtttgatcttggtataatgagtgggatagaagttaaaaaagaagaaatgttcaaaatggaaaacagcaggagagaaagagaaaaagtagagataaaaagaagaggaaaagtaacagcaaagcagagaaaaaacattttatgtggtggtttggaacgtttgggtagtgtgaaaagcttgcccttggtgtcttccaatttcccctctcagacctgctccctatcctaacaagcaccacctctatcccccacaaccttccaccatgttatctcttgctgtcccttggaagctccaagcacagatctctttgttgttgttgttattgtttgagatagagtcttgcactgttgcccaggctggagtgcactggcacaatttcggctcactgcaaactccacctcccgggttcaagtgattctcctgcctcagcctccctagtagctggaattacagatgcataccaccacacccaactaatattttggatttttcatagagacagggcttcattatgttggccaggctggtctcgaactcctgacctcaggtgatctgcctgccacagcctcccaaagtgctgggattacaggcgtgagccactgaacccagccagatttcttttttttcttctttattcttctagtgtccagactttgattataattaatcaattaattcatcgagcaactatttattaaatattcagggtatatttacaagggaagaattgtggtatatattccaaaacacaatcatgttgaggtgtgcatgaataacatgaccctgattaagcgttagccaagacgtttgatttaaacatttaaaaagaaaactccaaagatataagtgttggaaatacttagaaactaatagtgagctcacctctgtgctgtcctggtgcacaggtggtgtgtctttacattgctcctggtgctacaaaaacagttagacggctattgtcattttaagaccatgtgtacagattccagctgtccaggatttcaacatcccaggtagtcacctattcacacctgagtgtatgcaactaagctgtgcgctgaatactttgtgcaaaaacgcccaaaggggactgtggggtggaggggactggggggtggaggggactgcggggtggaggagactgtggggtggaggagactggggggtggaggggactgcggggtggaggagactgtggggtggaggggactgtggggtggaggggactgtggggtggatgactcccaagtgcaccaggcaggtgactggtgaatatgctacagtgctcggaaatataccaacataccccccacacatatttattttcaggaagggctaactgttgcaatttcacccccctttctcccagaagaatagatcgtacaccgctcggttgaaatgaagtagtttcatcagttctaacaaatgcgccacgctggtaggggtgttgatagttggggcgctgtgcgggtgtgagggcaggaggcacaggggaactctctctcccttccactcgagtttgctgtgcgtctaaaactgctctaaaaacaaagtctatttgaaaagaaacctcgcagttgcagtccccacaactgcctcccgctgctgccccataccctctgctccactttggagcacagcctctcagatgagctgttggtccagcacctctacagcatctccatgcaggtgccgattgccacggccggagcagagctctcagctcctcataatcctaaccagctccctatcttagtaacttatcttagtaactggcaacatctttcactgagtacgcaagccagaaatctgagtcacgttgattcttctcttttcctcccactcaaccctgctgcatccaatcaatcaagttctgtgggttccacttttaaagtagattccctaagtggtcactgcttaccgtctccactgctatggcctcagacctcaccaccgcctcttcggctgacaaatgcaatgaccccatcacttctcctctgctcccaaccttcccatagtttcccatcaactcagaatacaatcccaaactcctcacctggcctacaagtccttcactgacgcagcccctacctactttttccacctgcatctctgacctgggcccctggctcatgcagtcacgccagcctgcttgctgttcctgggacatcgagtctttcctcctcagcgacgctcttcccccaaacagagacatggtttgttccatcactgtatcccggctccatccaatggctttcctcaacttcgtcacctgaatgagcatcctctccaccccatccctggcatgattgacttacctgcattgttcttctctgtgagactcaccatccagagcattacaccatattttcatctgattatttgcttcttgtctgttcacctcctcagaacttgagcagcattataatagcatggatttggtctgtcttattctcaatatgatacaagtacttatgtacctggcacatagtaggtactcaataaatagtagtggcaacagagcaccaaaaatgagctcggcagaaaatgaagaattccattatttgtcttaaaaaggcagacaagctaggcacagttgctcacgcctgtaatcccaacactttgggaggctgagatggttcaatcccttgatcccaggagtttgagagtggcctgggcagcatgatgaaaccctgtctctacaaaaaatacaaaaattagccaggcaaggtggcacgagcctgtaatcccagctactcgggaggctgactgggaggatcacctgagcccgggagttagaggctgcattgagatcatgccactgcactccagcctgggcaacagagcaagatcctgctgtctcaaaaaaaaaaaaaaaaaaaaggcaaataagttactaacatggggaaatatgggtcataaaggagagagctggctttttcagaaaaagacagttattaggtatccaacaacagataaatggataaagaaaatttggtatatatacacaatggaatactgttcagccataaaaaagaatgaaatcctgtaattctcagcaatatggatggaactggaggaattataaaaaatgaaataagccaggaacagaaagttaaacactgcatgttctcagtcacatgtggaagctaaaaagtgtcagtctcacagaagtagaaagtagaaggaggatacttgagggtgggaagggagatgggaagggagtgatagggacagatttattaaaggatacaaaattacagctagacaggaagaataagttctagtgttctgtactactataagatgactacagttaataatgtattacatagtttcaaatagctagaaggaggtggggcggtggctcacacttgtaatcccagcactttgggaggccgacgagggtagatcacctgaggtcaggggtttgagaccagcctggccaacatggtaaaaccctgagtctactaaaaatacaaaaaattagccgggtgtggtggcgggcacctgtaatcccagctacttgggaggctgagacgggagaattgcttgaacccgggaggcagaagttgcagtgagctgagattgcactgttgcactccagcctgggtgacagaacgagactccatctcaaaacaaaaacaaaaacaaaaacaaaacccaaaatagctagaaggaggatattgaatattcccaacacaaagaaatgatggatgtttgagatgatggatgtgcgaattatgctgatctgatcactgcacgtcatatgtatcgaaacatcactatgtacgcatgaatatgtacagttattatttgtcagttttaaagtaaaatttttaaaaagaaagagaaagagaaagaaaaagacaagtgagagaactagaaattcatcccacacccaccagggatgaaattagcctaatctcaacagagttcagtctcttcatctaacagacaaggaacagaatctttcatcgcatgttggggaggggaagaatgaggttactcaaacaaaaagtttcgaacttctcagaaaaaaaatgaatttcgtcaattcgagatactgttaataccccatctggccatgattgacgaaacagacctttggattccgtgaaacgaaccccttgctaatgtcgcttctgggttcttcagaccttcttggcaggtggctggcttctctgttctaacttaaccctccagatgtcacatgaaaaaagtatgcttgttatgaaataatcctctggcttcattacccaggaagtccctgctttgtttttggtctttgtttttattttctcaagctctgacagaagtttctgggggaaactgtgggtctttatggatgagggtgaagttgtttagaaactaaaataaacaagatactgtattttcttcctcacgctctcttgctcatgcactcagaagacaaaggtacccccttcagttcccagaagctggtctgctcttttttgtttgttttaattgtagagacacggtctcgctctgtgcctaggctggagtgcagtggcacaatcggtagctcactgcagcctcaaccttccaggctcaaggatcctgccacctcagcctgctgagtagccgggactactggcacgcaccaacacacccagctaatttttaatttttttctagagaatctggtctcactatgttgcctaggctggtctcaaattcctggtcccaagcaatcctcctgccttagcttcccaaagtgctgggattacaggtgtgagcccccacacccagcccacttccgctcttagggagaggcgagtgcatttcagagagcactcgatgctcccaaaagaagaagttgacagagcccacgtcccctcagcccttcacacagcctccccttgtcttcctctcctactcagcactgtggctgcactaggacccctcatgatgaccaagatcctcataaagaggacaagaagttcatccagtaccagtcaggccaatatcccaaaattagcataactggcagaaatgcagaggcatcaacaactcctcttgacaacagggttggtagaagaatcaagggcctaattttgatgcctggcacaggttatgggagcagcagagtacatgctgcccagcggcttccagaagctcctggtccaccccgtcaagaagccggaggtcctgctgaggtgcaacacatctcagtgtgctgagactgccctcaatgttgcccccaagaactgcaaagccatcctggaaacagtggcccagctgcccattggagtcaccaatcccagtgccaagctgtgcagcaaagaaaaggattagactgctcatgtgcacgttttatttgtttttaaattaaaaaacaaaaaaaagaaagaaggaggaagtggaggaagaggaaggaggagggaggaggaggaggaatttacatcagcaggccgatcacatactagtccttgaattcatggttgaatgtactgaccattctccctacggacacttgaaggtttccatcaaacccttcataacatattgcataattgtggactctagacttgggccacaactgagtgattttttttttctcaaacccaattccacaaagtaaaagcctgatgaaatacagtgaaggctgatgccttattaactgtgtttcccaaatccagagctctaaaaaggttctgcatacagtcattcattcaatgcttaacgactgagcattaattccatgctaagtactgaactcagcactaggaataagaaggcgacctagaggcatatcctctctctaaagatgcatagagcctcattggaatgatcagccgtgtctccagagagctacaaggcagttttcaattggtaaatgccctgagagtgatgggcttgtggcatgtgtaagggttagacagacctgggacctagacatgacaccactcctgacgaattatgtgagtgtgggtgtttcacaaccacaatgagatgcaatgcctgcacttgtaacatggaaatagtgatggcatgccggccccgccagattgctgtgagaagtcagcggcagagacatgcaacattctcagcacagtgcttgccatgtagtaagggcctagtcagtgctagtgattcctttcaatattcctaagatgcagataagggaacagcccagaggagggggagcacttccagagggagggatgcggtgagacttccttcagcagggtagcactggagctgggtgttaaggagtgagtgagctttgggcttatggatttaacagaggaaaccaagaaaagaggaggcggtgttgcaggaacagtgagcagttgatgatttttattttgttctctggtctgcttgggaacatttttgtggcaaagacagcatgaaggatagcgaagaattaatactgaagagataggccagggcaggttatgaaggattttgaataccgggctaagaaatgtgggcttaatttcaaagacattatggacactcctaaaatgttacgttgtagataagggaaaagtattcttccagaagattaaattggggctgggcacggtggctcacgcctgtgatcccagcactttgggaggcgaagtgggcagatcacctgaggtcaggagtttgagatcagcctggccaacgtggtgaagccccatctctactgaaaaaaaaaattagccgggcatggtggtgggtgcctgtaatctcagctacttgggaggctgaagcaggagaatcacatgaacctgggaggcagaggttgcagtgagccaagattgcaccactgcattccagtgggcgacagagcaagactcagtcaaaaaaaaaaaagattaaactggaagcaatgggtaagaatggtggagtggagagacacatttgagtgagggaagccagctgaaaagctgtacagacgtctagacaaaatgtgacacaagcatgccttcacctccctgcaaagaccacagaccactgagctccaaagggggtttggaatccttgtcctgggccgccattggtaactcatcagtgctggcttgagagataaactctattatccatccctgaactaaaatcatgacagaagtggccagggagctttgctgctatccccccaggaaacacgtcctccactcaaatggaaagaggaccctctgacaacatctgtgggacccaacagcactggtcaccacaagccacaaaatgttaacaaagtcagttttcaattgttagggacggaggactcagttcatgattcatacaaaccaactgttctctcccagtgttttctgggtggcacaacccacaagtcaacagtggcttgggaactagacatttgagtagagttgggttatttgattcatagtggattttggttttccacgggacccctgtgcccttgtctagtagaatctggtggaaattacaaactgcagaaattcaactcagtgccgcaataacaggatgcacctgtagatttcgtagaattagcagcagcattctttcaataccagtttgagagaaataaccctgtttgcatagtgccaactggggcagaatctgaagtgtcttgcctgcctctcggccatgggaggcaccgatctcagcaacatctatccaaccgccatccacttaacaagcaaagatggaaggccctcgtgctccaggctatcctgcaatggttcatttgcttttgatgggattatcactttgacagatgtgcttgcaattaactgggggctttctgcttccaatccaaattcccacaggtggatcactggctcttggggagcaaaaacccttctttgtttgtttttgcttctcccagagcctgggcagagctccccattcctggatcctacgttgatatgcactgaattgaattatactaaagggtgcacccaagagtgcatgagcgaagtaaaatgtaatttgtgggacctcatgtggacatttcaggtccgtgtgtacaagataaaggagagaaaatcctgggggacaccacaggcctgggaaaatgacctcctactaagcctaacaagaacatccagtacataaacagcaggctctctgcaaccgcttcagtccttccactgccacgctcccagaaagcaaagggttatctcctgttcggattttggctctgagaccacagctcagcacatcactcctctagagaaaagaaagtctaagatgagagagtgaggctgctttcatgtggtgccagcgtatagtgcagggcaggcctgattgctgaacggatccctgcagacgtgagcggtcacttccccttttgagggcccatttcttttcctctttgaggagactgtgagcgtcctcagtgcagggctatgttttagcttcttggctctcctcacaggttctagcataattctttgattaattgcagtcaacgtttattgatggattatgtgacagaggtgaaattctttgatctgggtttcagcttttcctttcccccactccctcctttttcttttttttttttttttttttagaggcgaggtcttgctctgtggccctggctggagtgcagtggtgcaatcatagctcattgcagccttgacctcctggggtcaagcgaacctcaacgtcttggcctcctgagtagctgggactataggcatgcgccaccacgctcagcttcaccttttcctttccttgtgctcccctggcagatatgctggtaaacaatgaaccagtcaagaggacagcaacaggaggaaaatgggagaaaccccattattcgtggactaaacaggcttcccactagtcctggctcacagaggaagtcatgctccatgtttcaaatgtcctcaaagctcgttcaactccaaaatgcatgaagacaaaatgggaattttactcaagatttttgtgggctgttggggagaagagttaacattgcaaagcatattgcaaactcttatcttcaaatgattttaaaattttcttccaagctctttattatttctccagagctgccctgctcttcccactctgggtcctttctctgccactctcctcagcatgacttctccctaatcggccagcatttcttttattctatagagcaagttttcttgccctgggcacctctcatttgcatgttataccaccacaccaagtgagcctcagagcaccagtgttttaatccctgaaaacagtccttacgggattcagcacagaggtcctcttggcagcctgtagtctccagagtgacacgtcctcaacagtcaaagtgagcaagctatggtgcccatcaccaagtggggctcaccatttccctctgcgttcacttctctcctaccttcttccttatcccatccttcctccttcctttttttttctgcattcaattattcatggttattcatttcatacgggcatctgtgccacttggttctacaggcattttttttttttgagacagacttttgcccttgtcccccaggctggcgtgcagcggtgtgatcttggctcactgcaatctccacctcctaggttcaagcaagtctcctgccttagcctcccaagtagctggaattacaggcatgtgccaccaagcccggcaaatttttgtatttttagtagagacagggtttcaccatgttggccaggctggtctcaaactcctgacctcaggtgatctgcctgcctcggcctcccaaagtgctgggataacaggcgtgagccatcgtgctcggccggttctatgggcattgtggaagtgaccgttaacaagccccaagggtaagtaaaggaaaatgaaaggtgattgattcctcaccacctctccccttttttcctctactctttgcccctgctccccaatctagactctaataaacagaaatgatttttgttgcaagctgaaaactcgttcttgtggttggggctaggggggtggcaagtcaagctttagagttgtctggataataaatgctgtcttcaaggactgtccaacattgtaggaacaagagaacaacccaagtgaacaactaactcctgttcacaaatgctactgcctctctgccatcccctaacctcagcctcacacacttgaatttcgccaatccatttgatgagctcaaatcagtgaattttctcctcgccaaagctcacaaattctgttccccgcttcttgccccacatccaggcattaccaactgcattttccctttgcctgatattctggcatcaagcctccttgccattccaatttatttcaccttcctccagtccttatgatttccttcctgaagagtatttcagcatctctatgcctcaatcttccctgcacaccacaccagctcggcctcatcatcacatcacttggctatgtcccgcctgggttagacagcttcagtggctgaagtccatagatcttattctgtttttcgaggtccacctgactctgaatccagctgatatttctgcccttagcttctacccctctctacttctggttaactatggaccacactctgcttcctcaggaaccacctaccaaggccgtatccatccttcaaggacaatacgtgggcctttcctgatcacatcagctcaacaacttttccctcctacatttcaattgctcttcttaccataatcattagtattcaccccactgtacgtctagaaagaaagtggtcttaaacctaagggaaggcagtctaggtcagaaatttgttgtccgctgttctgagcagtttcttctaggaagtaccaaacatttctgataatagaattgagcaatttcctgatgaagtgagactcagcttgcactgttgaccggctgtccctggatgaacctagttacttttaaccaaatgttcctttcttgaacttgttcctttcttgaacttaatctaccaatgttatctagataactttcctcaaaaaaaaaaaaaaaaaaaaaaaccctctactaggaaagaaatctttgaaccggacttattggaaattacctccttgcagcaggtttgaaacaaaactttgaatttgcctcacaaagaatttgtctgaaactgctttagtatatgctagttatatttgtatgcacatgtggcttcatacatagtggttggacacccatatgtgttatgcactttgttaggtgacgtaagttcacagataaactggacatagggctatcctctagaggcccacagtttgacaccttaacctgagatccttggacctttgaagttcagagtgcccacaaccgctgggtgtggtggctcacacttgtaatcccagtactctgcagggctgaggtgggaggatcgcttgagtccaggagtctgagaccagcctgggcaacatgacaaaaccccatctctacaaaaattacaaaaaaaattagccaggcctggtggtgcatgcctgtggtcccagttacttgagaggctgaagtgggaggatcacttgagtcaaggaggtagaggctgcagtgagttgagatggcaacactgcactccagaaaccccatctcaaacaaaacagagcaaaacaaaacaaactgcccataatgctcctgaaacttcctacggatttatccagagtatgtgctgatgtgcattttttccaaggagggaaaccaaaggttctatcaaattaagaaaagagtttttaccattgtggaagacagtatggcgattcctcaagcatctaaaatcagaaataccatttgacccagcaatcctattactgggtatatacccaaaggaatagaaatcattctactataaagtcacatgcacccgtatgtttattgcagcactatttacaatagcaaaatggaaccaactgaaatgcccatcaatgagactagataaagaaaatgtgatacatatacaccatggaatactatgcagccatgaaaaggaatgagatcatgtccttggcagggacatggatgaagctggaagccattatcctcagcaaactaacacaggaacagaaaaccaaatgccgcatgttctcactcataagtgggagttgaacaatgacagcacatagacatagggaggggaacatcacacgccagggcctgctgcagggtggggggtggggtgtgaggggagggaacttagaagacaggtgagtaggtgcagcagaccaccatggcgcacttatacctatgtaaccaacctgcacgttctacacatgtatcctggaacttaaattaaaaacaaaaaagagtttttaatccaaaaaagattaacagcaactagaagaaagaaagagatataaacagtgaattgcaatgcagcacggcaggtgttatgatggagtagaaaggactggaaaaggcctcctggaggaagggacactcaagtgtctttccatttcacctgtaaactcattaagggcaaaagctttgctacagcttcagtatgagatcctgggcaatccgtgacaaaatgggtctgcttttgcacccccaacttcttctcacatccctgcatcgtgccatgcagcatcaactggaaacctcagcatcagcaaacgacgacagagcgttcatccgtaaggtgaaccagaaaagccagttcaatgacttgtttaaccatggtccatctcagaaccaagagttgggcctcttatttaccagaaaaattgtgggggctttgtgatatggctttaaaaaaatcttgtaattgccaggcgtggtggctcacacctgtaatcccagcactttgggaggccgaggtgggtgaatcgcctaaggtcaggagttcgagaccagcctgaccaacatggtgaaactccgtctctactaaaaatacaaaaactagctggatgtggtgacgcgtgcctgtaatcctagctactcaggaggctgacgcaggagaatcacttgaacctgggaggcagaggttgcagtgagccaagattgtgccattgcgctccaaaaaaaaaaaaaaaaagacattaacataaatttaaatattttataatgacaatccacattaactacttaaagcataagctattttccaggagaggcagcaagtgcattctactcccatgcccaagaagaaaggagcgtgactttggtgggagtactaggagtttctactggagcacttgcccgcagagtgagaaacgttcctagagaggaagttatacctgctgtggaatttaagagaatcttgtcatattttgacaagttttttgagatggaagtctcactctgtcgcccaggctggagtgcagtggcgcaatctcagctcactgcagcctgcacctcctcggttccagctattctcttgtctcagcctcctgagtaactgggattacaggcgcccgccactacgcctggctaatttttgtatttttagtagaaatggggttttaccatgttggccagactggtctcaaactcccgacctcaggtgatctgcctgcctcagcctcccaaagtgctggaattacaggcgtgtgccactgcgcctggctaatttttttttttttttttttttttttttttttttagtagagacggtggtttcaccatgtcatccaggctggtctcaaactcctgacctcaggtgatccacccaccttggtctaccaaagtgctcggattacaggcatgagccaccaggcccagtcaacgtgatgtgttttggaaccctgaattccttggcttgcccggagggttttctttttgttaatatctttgcttgctttctagtatttaaaaaattgtgttttgctctaactatgcaatggctttaagtcttagacaaatttccagggagcaaaacacactcaaccatttcataataatcagaagagagctctgatcaataaataagcaagactgaattttacaaaataatccaaagtttaaaaccaaagcccactttttgcatgatcctttaagagaaagaaatctggaagcaaaacaccttataaaatgacaatgcactttcaggagcccagggcactgtggtgaaatgatgatggctagtacaggttataagccttggggaattatttatgaattctcaggatccttcagttcgccgcatccttctccattatttgaatattggaggctgcctgaccagaatcttgtcaggactttgctccttcatcccaggtggtcccggctgactcctgaggacgttacagccctgaggggaggactcagcttatgaagtgctgggtgagaccactgccaagaagtgcttgctcaccctaccttcaacggcaggggaatctccctctccttttatgggcgtagctgaagaaaggattcataaatgaagttcaatccttctcatcaaccccagcccacacctccagcaattgaacttgaaaaaaaaaacctggtttgaaaaattaccgcaaactatattgtcatcaaaaaaaaaaaaaaaaaaaaacacttcctatatttgagatgagagaagagagtgctaggcagtttcctggctgaacacgccagcccaatacttaaagagagcaactcctgactccgatagagactggatggacccacaagggtgacagcccaggcggaccgatcttcccatcccacatcctccggcgcgatgccaaaaagaggctgacggcaactgggccttctgcagagaaagacctccgcttcactgccccggctggtcccaagggtcaggaagatggattcatacctgctgatgtggggactgctcacgttcatcatggtgcctggctgccaggcaggtaagggcctgtgggtgcccccggaattccgggaaggctgatgggcatccctcttcccagccacagaaccagagggagtccccaggtagatggttccaagaagggagttgaatcttgggttccacctcttgcctgtgacccacggggaccccagtttatgcctcactgttccttggtctgtcaagagagcctgaaatagcattaggttctcctgtccttctcagtccttgacaattaattctgggaagaatagtgtggcatgatatttgggatatttggatgttaacagggtcccgatgagcaggtttctcaagaaattatcttttattcttcaatgaatttccttttattctctgcactcccaccccccaactaagaagctatcaggaagctctttaagttcaggttaatttgctggagacatgagtactcatatatcaaacactgggagaatttaagatctcagaaaagtttagcttcaaggatgtatacactgcttttacgtcttaggaaataacacctaggaatttccttacaagtgcaactttacagaaatttttaaaaatatgcatactcacttttagaacattactacttctcataatcctatgtatatacatgatatgtatatgtatacgtgtttatatatgcaaattttaaatttcattccttgtttcaaatggattttctcgaagattttttttttttgacactgtctctgtcagccagactggagtgcagtggcgcgatattggcttactgcaaccttcgcctcccaggcttagcgatcctcccacctcagcctcctgagtagctgggactacaggcatacgccaccacacctggttaatttatttttttgtagagatggggtttttgccatgttgcccaagctggtcttgaactcctgggctcaagtgatccactcaccctggcctcccatactgctggtactacaggcatgaaccaccgtgcctggccaatatttttttttaaagaaataaaaaaccaccaacttctacctcaaaccactcttcctaattgagtgtgaattttctaataatgtcttccctttgcttactcaggaagacagataagaaagtttatagtgttttttgaaagtctataatggcaacaagtagaatgctaactggctgtagaaagaatttattaagaaatgaaacataatgatgcatttcaggagtctgcttgcttgtttaggggaagtgcccagtcatgctgggctgtgtactggcccagatgtaggagtgtctttaaagagggcattttatttacttattacatttttatttattttttttttactttttgagacagagtctcactctgttgcccaggctggagtgcagtggcgtgatctcagtccactgcaacctccacctcatgggctcaagtaattctcgtgcctcagactcctgagtagctaggtttacaggtgcgtgcaccaccacgaccagctaatttttgtatttttagtagagatggggtttcaccatattggtcaggctggtctcaaactcctgaccttgtggtccaccagccatggcctcccaaagtgctgggattacaggtgtgagccatcgcgcctgacctatgtgttttattttaataggttttggaggacaggtggtgtttggttacatgaataagttctttagtggtgatttgtaagattttggtgcacccatcacctgagcatgtatgctgtacccaatgcgttgtaagattttggtgcacccatcacctgagcatgtatgctgtacccagtgcgtagtctcttttccctcacccacctcgcaccctttcccctgagtcctcagagtccatcgtgccgttcttataaagagggcatacttttaggaaggtttttcaatgtgatttctacatccacagggtctttgctaactcagtctaagccaagaacaggaaaatcttgacaattaatcatgctctgcctctggaagacacatttcaagtaaactcgtgttatttctagctattggtgacttatccaagggtctgagtggtcttggagggagcaggggaactagagtcccataaggactccttcacgccattctcaacatctatccataccccatctgcccctcaacactataggaaatacaaaaatgagggagatatagtcctgacacttaagcaacttataacctggtgaggaggagaaaaacatagatataaatatagtaataccagtcagagtgtggtaagatctacggagcgttgggctatcagagaaggcttcatgaggatgacatgtaaagggagccccaagggaccagtaaatttccatcaatgagattccagggagagagaccccaatgagccaaaacacaggagtgccttagggagcagcaggtggtccaatgtgctcctgccctggacagggagggtggggatatggggaattcaaactggaaagttaggatgaggtaaaatgaatcatctaaggcattaggcatttttagtctgtatattgctgggccctgggatgtggtcagaaagagaattctcctagtgataacttcttaacttcacctagtaggcaataaagaactacaagaaaatttaaaactaccatttataaagtaacttctatgtgccagatatgtgtcctattgtaatcttcatagccactttgcagtatggatatcatgaacccctagatgaagcaagaacccaaaactcagactcgcacaggcagtgagagtgccagggtttgaacctggtctccctggattgttctgtttctgttcattgcaaacagggtcagcgctttatggagatgatactggcatagagtggagagagatcaggtgcacagagacaggtcatgaggctcttaaaatagtccaatcacaaggcaaatgaggacccagtggccaaagacaatgacaggggtcaagtttctggaatcaacaggaatttctaggcatcactccagggtaagaaaccatctcatcacagactttttctccaagaggaacctagtcttgaaacaaatcagactttttattcctcagggtaagagttctctaatgaaatcagactgtcaacagatgcaatttctagctgattcataagggcagattttcattctgaaaatttccaaagccaccatttaacatggcaagggtttatgaggacatattagtcaacttgagtgtttttagtctctatattactgggctctgggatgtggtcagaaagagaattctcctggtattaccaatatggcacgttattgaaggcacctttctcagaactgtggaaattctgagagcttgtatgtcccttgatcatctttctttcattctaggaattctgtgatcaaatctttatcctctagactcaaaaataattctttaaaaaaacagtgtggaaacccattgagataatgtgtttgtgtaattatccattcttgtaaagacaactgcccacaatggaatttcccatcttcacctttgtcagtcaaacacaaaatgtttaacccttcacatttaatctttcaacttcttgagatcccaaagtattattgctactgttacttcattcatcttcaagacatgtcttgaggctgtaagggctttcctaaacattgggagctcttcataagacagttgctactttccttaaaacagcatgccttaaataggcagtttgataaatcacctgtgcatatacttcattttagatgtgagaattgaaaaagaaaaaaattgacttcacaattctgcaccaaaagaatgagtttcacgaatgcgtcagttagaggtgctaatatagaacggttgctgagctctaaaactccactactccaccccactcccctgatagagaagtattcccagactggtttttgcctaaagccttgggtattctgaatacctctttgtgatttttttttctcttcctttttgagacagggtctcactctgtcactcaggctggagtgcagtggcgagatattggctcactgcaacctctgcctcccgggttcaagtgattctcctgcctcagcctccccaagtagctgggattacaggcacctgccaccacgcctggctaatttttgtatttttagtagagacggggtttcaccaagttggccaggctggtctcgaactcctgacctcaggtgatctgcccaccttggcctcccaaagcactgggattacaggcatgagccaccgcacccagtcctctttgtgacttttttgttggagtcattcttctgcgagctatggatatcatcaaggcaggcagtccctcaacgtggcagctgttcccacccttccctgctcctcttcttgcccaaggatgagcagaaactttacagaaaaagagagaattccctcaggaaatgaggcatgttgcttgaggtcacagggaatagaattagcaggaaaataaaccttgcaggaagcagaaagtgggccaaagcactgaggagaggacacggggagggcgtgagtttttgacagatttctctctgtaaaatgaggaggtcacccagggatcttgaaactcccttccagttccttcactctatgtcaaggattccagaaaggaaataaaataagctctgcttaaaaggcattttcaagctggggaactttgggatgaaaaagtttcccaaatgaagacatactggcacggtcagggttgagcgacttttgtgtatcaatgcacccaagcctgatgtctcattgtgggttatttccagctctgaagaagtactgcctggcagccagcatgacccactgcttctgtaattgctgcagttgcaggtgtcaacgcaaaaactccactcactcaattctcaaaatctatccaatatctctcatgccccttttcaatactataggaaatgtaaaaatgagcgacatagtcctgatccttaagagagtcataagttggtgaggaggagaaaggcatagatatagtcatggtaacacaagtcatatgtggtaagatctactgagcatggggctatcagagaaagcttcatgagggtgacatggaaagggagccctgagggactggtaaatttccatcagtgacattccagggagagaggccccaagacacaggggcagcaggtggtccactgtgctcctgccctggacagggagggcggggtcctctgctgtttgtttgcttgtgtaggaattttcccctcaaacaatgtccttgtctcccatgggagaagttttacatgagtgggaacctgtttctcttctctatcccaggccattccctgagagaagagaaaggggaatcttttttttttttggacagtttcgctctgtcgcccaggctagagcacagtggtgcaatctcaactcactgcaaccttcagctcctgggttcaagtgattctcctgcctctgtctcctgagtagctgggattacaggtgtgcaccaccatgcctggctccttttttgtaattttagtagagagggggtttttgctatgttgcgtaggctggtcttgaactccgagcctcaagccatccatctgcatgggccttccaaagtgctgggattacaggcatgagccactgtgcccagctgaaaagagaatcttaattcagttgattacttctaaaagttataagaccttcttcactgaaagagttcacatagaagctgaacttgaatccagccctcttaaatttcagttcaatattccctgcacatctgcacatctttacatgaattctcagtgatattccttcatccatccattcatgcatgaggattacagagatgaagaaagttccagctcttatcctcttgtgctcacagtttaacacgggagatgaaactgctgctgaatggctcccattctgaagtcagccaacagtgtttgccaatagcccccactgaataccccaccatattctcaagtaactcactcatttaggggaaaacaataatataattgtctctagaaattttaggtattctccactctaagattactcagtgttttgactgatctcaaggcgactccgtggtttgcttctgtcaaaaagaaaacacagttcccactgggaaatgtgtggagagtaatggttcaaaacgccagctgtacattagtgtatatccaggatgctttaaaaagtgatggccaacccctactgggaagtgaggagcccctctgcccggccagccgccccgtccgggagggaggtggggggagtcggcccccccgcccggccagccgccccgtccgggaggtggggggcgcctctgcccggccgcccctactgggaagtgaggagcccctctgcccggccaccaccccgtctgggaggtgtgcccaacagctcattgagagcgggccaggatgacaatggcggctttgtggaatggaaaggcgggaaaggtggggaaaagattgagaaatcggatggttgccgtgtctgtgtagagagaggtagacatgggagacttttcattttgttctgcactaagaaaaattcctctgccttgggatcctgttgatctgtgaccttacccccaaccctgtgctctctgaaacatgtgctgtgtccactcaggattaaatggattaagggcggtgaaaaaaaaaaaaaaaaaaaaaaaaaaaaaaaaaaagtgatggccaagactcataagatgaattaagcggactctctggggaacagaaccgaacatcacaataccttcccttccagttccttgaatacttccaaatcgcacttaggattgaaactcaccaaattagagagatggaataatgatttccatggttggtctgattcactaggaacaggtatgctcaagcagtacttctcaacctttaatgcatttagaaatcatccagggatcttgtcacggagcaaattctgactcgggaggtcaggggttaccgcctaagattctggtgcaaacaggttccacaggaggcctatgttgtgggtgcatgaaccccattttgagtaacaaggctatcaagtcagagaataaatacgcattgcttttacccacacagaacttgcgactgaaatgagaaaataggctgagtgtgatagctcatgcctgtaatacctgcactttgggaggccaaggcaggaggatcccatgagcccaggagttcaaaaccagcctgggcaacatagtgagactctgcctcttaaaaaaaaattagaaaaagggaaaaccaatctgggaaagatcaaatattgatcaaacattgcaaataatgccataaatgatcagaatagggagagtaacatgctacctggagaactagaaaaaaaattctcagagaaggtggccctgggacctcctggctctgaatggtggttctgaatatcaggagaggggctggagaatggtgttttctagtgatgctgctggagtcgtgtacatggaccgtgttccatgagtagtgagctgaccaattagagagatgaggggtttgccaggacaactacataatgagccatatttcaacatacatgaagttttgtgtgtgtgtgccaagcaaatgagtctcagattctcggacaaaaacgaatacttttgctcagacagacagcatgtgagtgcttctcccccagcttcaaccctgcagtgtctacaggtgtcattggtccccggtagacgtcctcggttcaatgggtcactgatcacttatcaccagcaccacatgaccctggatggcagccaaagagttcctgggtcttgtttccctacctccacatttttttcctgacccagcccgagccacgtgcacaccacagggctggagtcccagtgcttttgtcctgacagcccattctcccactcccacacccaaccagttccccggggggtttttgaccagcagctccgcctgcagccctcgacccggatccaggcatcctgcttaaggaggggttcaggtggcaggaaactccagggcaacaaagtgtgggtggcatgggtggggttgaccggaaggtcactgtgctgggaggaagaggaacgggtggagggaaggcaagatacggatcaggagtattgacatcctgtgccagtagaggggcctgccccatggtggaaggtgtggccggatgagctcgctggcccatgtccccccgtttcccaggctttttcctcccacgctgtatgcagtgcaagaacaagctggtgcaattggactagcagcaattgagtccttttacccaaaagaagaagaaagagcaatgtttcaaaagaataaaaaggaagctgcagccaggtgcagtggctcattcctgtaatcccagcactttggggggccaagaggggaggatccctggagcccaggagtttgagaccagcctgggcaacatagtgagaccccacctctattttttaaaatgataattaattttaaataaggaagtttgtgaaagccattggtttctttattctaaagagcgtggaaaataggacagtctccaacaggccctgatttcctttggtaagaaaatgagcaaagctatagactaggaaacatgactggttaaagccggcccatgcaccaactccgatactgatagttatgtttcctttcgttcttatttgcttcaagctttgttccagaaaacatttgaacactagctagaaccaccacagtgaatatccattgcctaaatgctatctttcaggtattatgttcagacatagtattactttggttaattctcaaaataaagtaggtcatatgattatccccattttctgcctggtgaactgtggttaaatgggcttacagagattaaatgggttgcctgatgtagcccaacgaggaaggggctaggataggaagcaggcgctctcattccagaacctgccttttttcctcctgtctaaactgctgctaaaggtcaaagacaaaggtgccatgtgagcagggaagttatttttgttttttacaaaggtgaagtaataggctgtgagtaatgcccactgctccttcagccccaggtacatgcagtgaggcggtacccacagagccgcgtggcactcctcaacctgctagagcagccggcctcctgcaggatggcttaaggaccacctggtccttggggtctgggttctccgggtcctgctgttccctgcagccttccttctacccccagagcagcttgggggcatctttagagaaagcggcagtgtcgcacctgccccagcagccacaaaacagaggaaattctgagcacctccgggcgtgagtcaccataccacattcaggaattgccacctctgcccacagaatcacccactcttttctgtttgggaccaaaatagatacctccttcagaagccgctgctttctgtactctcagcaataaaaaaacaaaggctaggataggtgtgtgcctctgaggcgtgagggggggcgcgttttctcccctgggaaggttttcagagagaagttgttgctacagcagtacaggcagctgatgggttgagggtacaggaggaagagggaaagtcagggagattggagacaacctcttgtgtggtaggacttccggctattggtttgttcattcctttgttcattcattcattcagcaaatgttcattgaggaactgctatgtgtcaggcacagggtttgagacacagagatgaataagagcccatccttgacctctgcacag

SEQ ID NO: 513 - DNA, 7020 bp, Homo sapiens
cctcagctgtaacatttgcctcaggagacccaaattcttcactgctctgctcatgtatgtgaataatcatgaaagcactgagcactgacattagggttacaaataaattttagccagtgagtgaattcacaaatacagaatctacaaataatgaggatcaaccatatgtataaatacaggccatttgctttttatcattaacactgtgaccaagatttgatgtgatctttacataaaaatattaagcaaatttccaaacctggtgtaagccaggatttctgatccccttactgctaaatgaacaaacaaaaaagagaccacacaaaatgccaaaactagaaactataaacatgcagaaaacagtgctgctggacaaagtcacgccattccacaagtggtaccactggccaagggtggacatagcatgcatttaccttcaggaacataaggaagagctgacccggtgtgaggacttcctggttcaccaaactatcaggattgtcctccatgcactctcctttggctaaagcaaagagctttcgcgtcatgagacaaagcatataaaacttttcagtattggatttcaagtggatacagatgcactggctgtgaaaacagaaaaaaaaaaaagcttaaaacaattcagttggtaatactacttaatattctattaaccaagatccccaactcatgcttacttaactttaattaaataaaattaagcattcagtttttgagctacactggccacatttgaagtgcttatcatgtgactggtggctatgcactggacagcaccagtatggagctggcttctttagtaattatacagtggttatataagacaaagtccttgctttggagaaataaagtgatacaatccctgcaactttcagggattgtacagaaagaaaaatgtacatctgtgtacacagaaagtaaaaaagtaaatgtaaatgaatgaaatgttcacaattagaatccaatgtactatttggacattattctggaagtctgaaattatttcaaaataaaagttaaaaagtactataaaataaaacacgactactaaaaaaatacaagtgaggagggccgcaaaaacaaaggtagcccccggctagcaaggaccaggattctaccccaagattcattctcattcccaaatgactcgcccgcccaaactgcaaccaatacaaagaaccactgacagccctccgcccctccaaaaacagtttagacaaagcacacatacttaaacaggaactccgcagcttgctcatttgggtaccagtcaggaacattgagttttactctgaagcattcacctaggtagttaaggacctgtttttgtgtcgaacaaccctcttccattacaatccttaacatctgagaaacagagttcctaaggaaagaatcatcctcttttcctttgatgagctcctgaaagatctgataatcagaaaagctgacaagtgcctagaatagaaaataaaaggtttaattgctcactaataactaaaatactttatctattcactaataattatcttctctcatttttttaatacccaaggaaaattagcactctgctattgctgaatcaaagtaaactctctaaaataaagcattctttgtatgatagccagacagcacaattgcctccagggtcctcatctcctggtgttcacaaacgtgtagtttcctcccatgccgaatcaaggctggcctgcttgaccaagagaatgtggtgaaaaagataatgggagactcccagggctagatcacaaagggcactgcagctttttccttctgcatcttctgctctctgttctctcagctaactatatggaggaagacagttgcctcaagcagcctacagaaagggccatgtagagagcaaccccatgaggagacctcctgccaccaaccagcagatttgccagccatgtgagtgagccaccttggaagtcctgaaaatgactgcagtcctgtctgacatctccatgcaacctcctgagaccctgggccacaagtgcccagccaaagcactcccaaactcccgacccgcagaaactgtgagacagaaatgttattgagttttaagctattgaattttgacgtaatttgttttggagcagtagacaactagtacagtattattttaacaaggagaatccatccaatgtgcacaggatactacccccagtgaatttcttcataacaaaagaatgcattcattaagtcataccttaagtgcaaatcccaaaggaagaaagaacagttcttttcggtaaataaagttcaacataacagtgccattttccaagtagtggaggttcatattgacagcggaatgttcttccctcacacagtgcattgaaactcctattgaaccaaacaacaaaaaaatcagaaactcattgatatcttaattgcttcaaccattttctttctgaacaatcttaacctcttagacacaattaaagccaaatcactaagtttagccaagactggcaatcaaaaatgtttctaaacctcagcaaatgtcctcttgcatgcaaaatctacccagattgagaaacactaatgtaaaataaccgaaactatgaatttaagcaaacttcaaagtttccctccaggacagagtccacatcttttagcactttatatctgccttaaactgtggagtctggtcaagacatggtgcttgatctaatagttccaatggagaaaagtagaattttagattttatttcagtttcaggcaaagactgctaagacatactaccatcaactgatgcaaaagaaaatcactagacattcaggcatgctgtttttctaggtatagtatgtatggctataattaaggtctgatttttagctcaactatcaggacaaattgtttaactgtcagggttgctcaagaatacaacatgctgtcttaggcattgtcaaagagaatgttccaacagaggccaggtggctgtcagacagagaccctgaggggtgtaccacagtggcctgaaccagaagacatccaaggcccacattcacctatggccaagccagactagcttccatcttcataagtagtaacaaaaatacacatgctctttcagtttgcaaaagtgcagcagcctgaaccagaagacagccaagacccacacccacttatggccaagccagactagctttcatcttcataagtagtaacaaaaatacacatgctctttcagttagcaaaagtgaattttaaaatgcttatgattgataaaaatcatatatattcaaggtgtacaataccttgaatatacatatacatatattataatgatttccacaatcaaactgatgaaaacatcaatcaccatagttatcatttgtagtacgtgtgcacgcgtgtgtggttgagacacttaaaatgtactcatcaattttaagcagtacagtattactatcatcaccaggctgtacatcagatccccagaacttattcatcttgtaactgcaagtctgtatcctctgactaacatctctccatttcttcttccatcccaattatgaaaacttaacacaagaatgctcaatagaaaaacaacaaaaaacaaaagaaagaccagacacggtggctcatgcatgtaatctcagcactttgggaggctgaggcagaaggactgcttgagcccaagagttcgagatcagcctgggcaacgtggtgaaaccccatccctaccaaaaaaaaaaaaaaaaagaaacaaaaatatcaaagaccatttggatgcatctacttcaaaaaaaaaaaaagttttaaattttccttaaaaaatattctaataatctccagaacttaccatactgagtataaccaggccctctggttttccattttggtcttatcattgcaatgggaaaatttctccgaggcataatcaacattcggatgactttttcaatgccattgattataaaatagccccccatttcctgccaaaaagatgaattgcaacttgttaaacaaagatacatgactaactgtaaacatgaacctcactcctagccaaaggtagtacaacacacagaataggaacacagaggtgaaatgtactactgatcccttgaaaacagtacacagacactgtctttgtgtgaattaacagttttctcaagtatattacaaaggtcctagggacatgggaaaaaagtatggaagaaaaacagggtacttctctttatcagacaggctcaacctatcttgcctttctgtcccctaaaatgacttcagtcttcaaataacactaaaaaaaacttactccaaagaggtgttgaaagataaaaactgggccgggcgcggtggctcacgcctgtaatcacagcactttgggaggccgagacaggagcatcacaaggtcaggagatcaagaccatcctggctaacacggtgaaaccccgtctctactaaaaatacaaaaaattagccaggcgtggtagtgggcgcctgtagtcccagctactcgggaggctgaggcaggagaatggcttgaacccaggaggcggagcttgcagtgagccaagattgcgccactgcgctccaacctgggtgagagagggagactccgtctcaaaaaaaaaaaaaaagaaagataaaaactgtaaccattttgcttccatacgagtatggtttcccaaatacgttcaaaaacttgattgtatgaaagctctggaaaccagaaatttggattagctaaatagaaaaatatttttaatagctctgctcaatatcacatttctgtaataaacagctactatttacgaattgcctactatgaaacaggcatattatagtaggtgctctatgttatcataacatttaattctcataacaatgagtggggtagctattatacccacttgcagcagaggaaactgaggctcagggagattaacttccccaaaccacaagactgataagcggaagagctgtgtgtcaaacccagatctgacaccaaaaccctcttcccaccacataacaccatctacctatttagtaggcactgtttgttcatcttgattacctcaactcaactctgcaaagccacctaatatagctgaaagaaatgatgaagggaatgcatataagtcatttaatatgcgcacagaatcttactgttagcaaagcagacatttttatttcacttttttagtgacggggtctcactctgtctcccgggctggagtgcagtggcacaatcatggctcactgtagtgaggcctcctgggctcaactgatgctcccgcctcagcctcccagttagctgggactacagatccatgccaccaccatgcccagataaatagacatttttgacaatagctttgtggattaagacagcttgaaaaaaaaaacaaattttgtggaagtatgtctctatcattcagaaaattagggaaaaacctaccagttcttccccccgaacaataatattctctaattttacagccactttttcatactgtctaatttgatagttattcagagccatacactgtatgcaggcaagatactgatatctctttcacctatccagaaattggagcacagaaagaaaacactgacacacttcttgtcttcttactcccaacccaggccttctctactgtctcatgcctggacgcccgtcattacctctgcctcctcatggtgctcaatgagggcttgtgggggaaggttacgtaagttgcaaagcttggatttcaccatgatgggaacatagccaagaaactgcttaatgattccttttgagattccattcactgcccagttgatatcagcctaaatgaaaacaagagaaaaagttacttaacagaaatatctgcatttacgagaacaaatgagtattttcaaagactgaggaagaagatcaattaaattattttatgccttagatttagaaggtgggatctcttagacaatagcaccaagaaagcaatttctggcataaactttattaggcacccgccctactcccaaatatgtgcagtgttgagagtcacacagtatcactagtactcactgtcaacttcccacggtaggtactccttcggccccggcattctgctggataaacattggcctctttgcagatggtcccttttggaactgtaggtggactgataacagcatccagaatagtaaaagagatacgctcatctttgaaagcaaattcaaagggaggtatagcctgaaatgcaattcacactattaaattgcttgcatttccaaggcattttttctctaagactcttccaaatcttatgtgttctacaaacattgatgcctgtgatgccaccatgacacacctaaaaaggacagttaaggctacctccagttggccgggcgcagtggttcacgcctgtaatctcagcactttgggaggccgaggtgggaggatcacaaggtcaggagatcgagaccatcctggctaacacggtgaaaccccatctctactaaaaatacaaaaaaaattagccaggcgtggtggtgggcgcctgtagtcccagctactcgggaggctgaggcaggagaatggcgtgaacccgggaggcagagcctgcagtgagcagagatcacgccactgcactccagcctgggcgacagagcgagactccgtctcaaaaaaaaaaaaaaaaaaaaaaaaaaaaaaaaaaagctacctccagtctactcataacttcactaaatacttaaaaccacaaagcattattagtacaagattgttttgagtgaccacatgtgtcagagactgtagtaggctctagggatacagctgtgaacagaacaaaattcctgttctctgaaccaagagccttgtgtattcttaacttgtctatgtgcatagcaagacaaatgggactactgctaatagagcaaggatacggaaacatcctttaggatttaagactagatgcttaatgtacaatggcaacgtcaaactgaagccagagccatgcaaaggaaaagat

SEQ ID NO: 514 - DNA, 6396 bp, Homo sapiens
ttacaagcatgagccactgcgcccggcctacaaagtcttaatgactggagttatcctactcttaatgtggtgtatccatctttacccaaaacctggcctacaggcagatcaacacaggtgtcgagcagcagaattatgggtacattgccagttcctgctctgacttttttcctcttctcaatctagattgcccctcccctcccctaaacctgacagcagacagatataatacaactgactgcatacctcttctgagttaaaaaccacctttctcttatgcttaacaaactgactctagttactgtaactggacctgattttgcccaaactgcatcaacctgcatttacagcaatctcttgtagcaatatcacaactttttgaacttatctgccaaaaagccacacagtgatttgtagtaaaacattacggcataatctggcagctgactgacaacctgattacatcttttaaaaattctgttgggactgggcacgcctataatcccggcactttgagaggctaaggtgggtacatcacttaagcccaggagtttgagaccagcctggccaacagggcgaaacctgtctctagaaaaattacaaaaaaattagccagccacggtggtgaatgcctataatcccaagctacctgggcagctgaggtgggaggatcacctgaggctggcaggtgaaggatgcagtgagctatgatcacaccactgcactccagcctgggtgacagaataagagaccctgtctcaaaaaattaagtaaaattttgttgggagcaaagattgggacttgtattacaaaacgtccaaaaaactcacttcttcaacaaattgtctctgtatggcacgctagaggattttccactgcagagggatgcaccatggtaaccttaaggagatgcgtgagtggtgtctttatttattttattttacttattatttttttgagacggagtctcactctgtcgcccaggctggagtgcagtggcgtgatcttggctcactgcaacctctgcctcctggtttcaagcgattctcctgcctcagcctccctagtagctgggattacacacgcccaccaccaggcccggctaattttttatatttttagtagagacagggttccaccctgttagccaggatggtctcgatctcctgacctcatgatccacccgcctcggcctcccaaagtgctgggattacaggcgtgaggcaccgtgcccagcctgttttttgtatttttagtagaggcggggtttcaccatgttggccaggctggtctcaaactcctgacctcaaatgatccacccacctcggcctccaaaagtgctaggattacaggcgtgagccaccatgcctggccggtgtctttcttttataaaagaagaaaagggccaggcgtggtggctcacgcctgtaatcccaacactttgggaggctgaggcgggtggatcacgaggtcaggagatcgagaccatcctgcctattacggtgaaaccccgcctctactaaaaacacaaaaaattagccgggcgtggtggcaggcacctgtagtcccagctactcgggaggctgaggcaggagaatggcgtgaacccgggaggcagagcttgcagtgagccaagatcgcaccactgcactccagcctgggtgatagagcgagactccgtctcaaaaaataaaataaaataaaataaaataaaatgaagaaaagaacaattgtgaaaaaatgtgagagaagagaaacctacaggccacaggcccattcttaagcagatcactcataggcaaggatacaaaataaagtcaaggatctagaagttgatttccattcaacaatctatgtgcccaaagatgttacagaaagtgtctgtgtaccccctccacatatttccatctgaagaccactgcactatagcattccggacagaaagtgggcaagcaagaggccaggaagtacaggaggagtaagaaaagaaacagacatcacggctaacacggtgaaaccccacctctagtaaaaatacaaaaattagccaggtgtggtggaaggcacctgtagtcccagctactcgggaggctgaggcaggagaatggtgtgaagcccggggcaggccgagcttgcagtgagccaaaattgtgccactgcactccagtgcagagtgagactccatctcaaaaaagaaaaaaaaaaaaaaagaacagaaacagaaaaaacattgggatttcaatgtagcatgcacggggtgggataaatatggaggggagatgagccaggcagcactgacattttgatgtggaggctaatgataagctctcaccatgtgctaagcaacttacagacattaacccttaccaccacctcatgaaacaagcaagctggagagcatcagagtgaagaggggccaatcaccatgctctcctgacttctttcagtggcagttttggcagcctgagaatccagggagatgtgtggtggaagactgaggaggcgaggcctagggaggttagtcaggacagagctgagatgactaagtgagatacggatggaaatgaaggggggctgggaggagtggggtgctaagagatggaggttacagagagggtgaaggatgtgatgagcaccttctttgtgctccaagggaaggtaaccaagggaaggtatctgggaaactgggatgaggttttattttgaaatgtcgaaattttaatacctcaaaaataatatcctttgaaactcattaaaatttatgatgagaaatggaaatgttttggatgtcaacttgcaaatgtataaagagacacaaaccttccaaaattattttacggggtatgtgagcaaaaatatttgcagtggctttgctttccttgccagagatctaacctcatccaagagctccagcaggacactccaactgagttaacccagtcaaataaatgccctaattcttgcaaggcactggttcagaaacagcaaggattcgggaattcctggtttggaaatggacatccaccttcatctgggtcaatattttgaggacgtttgctgggagcttctgggaatagtttcctgccatcctgagagaaccataggaaaatacttccatatattattgcctgtacctgctgctgccatctcactaccagcctgtggatgagggcagctaaagctcagaaaaacaagggagatgctgccagggccactggattaatcagtcctgaaaccacgatacctatttttttttttttctttggagatggagcctcgctctgtctcccaggctggagtgcaatggcgcaatcttggctcaccgcaacctccgcctcccaggctcaggcgattctcccacctcagcctcccaagcagctggtattacaggcatctgccaccacgcctggctaattttgtatttctagtagagacagggtttcaccatgttggccaggctggtctcgagctcctgacctcaggtgatccgcccacctttgcctcccaaagtgctgggattacaggcatgagccatcacgcccagctgaccccctccattttcttccctgacccccaggctctaaggcagacagctactccttcaccttgtagcagctaccccactgcattattaatttttcatacctattttcttctctagaccataagcaaggatgctgttccattcatcctggtattctgagtacctagcatatttcagatacctggtaaatgttaagtgaatttgtgtaactgtcttatatatataatgaatctgcaatacctcccttttttctgagacagggtcttggctctattgcccagactcactgcagcttcaacttcccaggctcaagaaaatcctcccacctcagcctcccaagtagctgggactacaagcatgcgccaccacacccaactacccaactaatttctttgttttttgtacagatggtgtctcactatgttgcccaggctggtcttgaactcctgtgctcaagtgatcctcccgcctaggcctcccaaaatgctgggattacaggcatgagccactgcacccagcctctgtaatactcttgatggctaactggatatttcattcatcattatatctaaagagcctaggatagtgtctgacacatagctggtgtcgataactgtttgtaaaaataagttccttttcccaatctgggtgatatttaatttatggcactgttaacctcctttcctctcttctccctctgacccacaatagggctctatctttgcagctcaaacctgtctccttttcacgaccacccctcataagccaatatcttgtctggcagcacagggcacaatctgccactagggcgttaagtttgtgacactgcccgccatttcgtcctagcggtttacttgggggtggaatgtctgagaaaaccacagctcccacgggtccccacctcggtacagaagggagtgtccctgcttctcccacccccacggctgacaggcaccaaaccagagctgggactgtccctggcggtgtccaggccccaccctctctgtgtgcaggtggaaatgaaggcctgggggcggggggaatggagggaggcataaacttcaaggtcacacagcgaaccccggtcagaacgggcctaaacgtagggtttccgctcggctctctagggagctgggagcccagcccccgcctacccccacagccgcgacggaatgaggtctcaccgcaggccgctactgccccgcgctcgctcactccgctgaggctccgcgctgctgggccgctcgcacagagcccgcagctgttgtcccggtgtcactggcgacgggcatcggccacttccggtacccgggcggcactccagccaatcggcgcgcgtcgcactccgctggaggaacaggtggtcagcgcaccgacgcccccttgccttttccggcttgcttttcgccggttctagccctagcccaagttccacgtcgccgccgcctgccgagccggctccctggaacagcaaagtgcacccgtcgatgcccacttcagccccggaatcattgacgacctgagtcctccgggtttcctagaacggctccggggatgaacttccgctccgcgatctgccgctctgcgccctcgtgtcgctccccaagcattgctctaggctcaagaactcgagaatccgcttcgcattcccgcggggaccgtttgcgcgacccttttaactctcccaacccgcatcgttcttatcccatccttcctttccacagactccgtgggtctgataagcacagggctgcagatcctgggaacaggtctctcctcggcgggagcgaagggagacatgctttgagttccggaagggcttgcaggagtgacgtttggcctgaaatctcaagattgcgtgggaattaccaaggttaagagtaaaggcctaggttaagctgccgaggccacggaaacagcattctgcagctagccttcctgggttccctgagcaagcttggcccattctcacctcagaacctttccttgttacttcctctgtaattttgcacagccagcttgttttcttgtttgtttgttttttgagatggagtttcgctcttgttgtccaggctggagtgcgatggcgccatctccgctcaccgcaacctccgcctcccggattcaagcgattctcctacttcagcctccccgagtaactgggattacaagcatgtgccaccacgcccggctaattttgtattttaggtagagacgggttttctccattttggtcaggctggtctcgaactcccgacctcaggtgatccggccgcctcggcctcccaaagtgctgggattacagacatgagccaccgcgcccggcctccagcttgtttttgtttgttttttgaggcggagtttcgctcttgtcgccaaggctggagtgcaatggcacgatctctgctcactgcaacctccacctcccgggttcaagcgattctccagcctcagcctccagagtagctgggattacaagtgccagccaccacgcccggctaatttttgtatttttagtagagacggggtttcaccatgttggtcaggctggtctcgaacttctgaccttaggtcagaccttaggcccaccttggcctcccaaagtgctgggattacaggcgtgagctaccgcgtccagccagccagtttgtttttaggtgtcagttccaagatcaccacattgaagactttcattctatataatgttgcctcagagtacactatccttcccaaatatcagttacaaaggactatgattagccctgtttgggtctggtgctcaaccatggaccaatcaagggggaaaggaccgtgtgatttaccaagcctggtcacctgccttcccgcaagga

SEQ ID NO: 515 - DNA, 4892 bp, Homo sapiens
ggccggccgggccgccagcccctgtctgggccgctgtcctttgggccctggcggcctcagccgctcgctgtccgggtgcggcggcggccgcggcggcggtggcgggtgagggcgcgtgtgtgtgagcgcgcccggagccactgcagcatctctgcatcaagatgtgctcctccctctcccaggctccgctcactggctggctctggtcctcagccaacgctcgggggccctggagatggcttccttctgcccccctcccaccccacttccgtccccaccctcctggctttacctcatttgctgtcatttaaggaccagggagcgagcccagcgcgcgtcttccataatgcatgggccgctcatggacaggccgcggggcgctgtctggcccgcctgccctcccgatcctgcccagccccacttctagtccccctgcccagggctgaaggggcaggagaggggcggggtgaagagggaaaagaaagtggctcttactcctcaaaccctggagacccatggagccaaaactcctggtttccccagaaatcccctatccgaggaagagatccaaatcagaaatcccagcttgctgtgtggggcaagtggcagggaggggctgtctctgttgcccggtccaccccatgttcctctttattgtttcccttgttcaaaagtagtttgagctttttgtcaaaatatctaaatattagaggacatttaaaaatacatagtgaaagtccctcaaccactactcttaataaatctaagtacatgcccccaggtttattattttcgtgtatacaattacatgggttagtagggttatttcacacaaatgtgattacataaaacagtaggattggccaaagacttttaactgtgtaactgatcttggacacttttacgcatcagtacgtttggatccaatcccatttttaagcaaccagcagtgtgatgtcatgaaaagctccctggattaggggtctgggtgtctgaagcatactctgggctccacaaccgactggctgtgtgtgcttggctaggtgccctgccctctctgagcctcgctggtacctgaagggattaaagatggacacagtcctgccagctctgagattctaagtgctcacccttgtcagcgatgcctttctcctgccctgctccggtcacgtgggggagtgcccaggaaggctgtggcccggaggcggagggaccagccatctgcggcaccagtcggccctgtcaggctgtcactgttgtctcacccccctctgatctgcctgctgtccagcttgcacaggcaagaccggtgagcagtccagatgctgcaacagctggcagggccaggccagcctcccagttttaaatggctatacctgtcaagcctggatcatggctccatgtctccctgagtggaggaggtcctggggacctgggccagaatgagagggtctggaaaaggagaaggagtcggggaggttctgctgctcagcctccaaggctggaatgtctgcccaggtcccacatgcgctcccctcctttccttctgagcccctccaaagggcttgcccaacttgagagatagtcttctttgttcctgatggggaggacttggattttgctaatgatgtttcttaaataatgttgaatgctgttatatagacagacacatcaaccccttgccaggatatctttcccttccttcccctgcccacactgtccttgcctatctgtatgtctgagggctggcacattggctctgagctcctgaggtgaaccttgctctttggcaccattcaagtcagcctgggctccaaagagaggctctgcaagttctctcctagcagaaaacggcaggaacaagtccttgccaagaaaaggatgctatgtctgctgcagggggctgacgggccaggaaataggctggcccaggaaccaacagtctggaaatgcttgcaaggattgctttagacggagacagctgtctttgtgactctattttaggacagctgctgccctgtggtgggagctgggtctctggggagggtcgttagcacaggtgacttgggtcttaaagactctcagatctcaatgcaaccagcatgctccatgtggactctggcagacacaataagtgaaaacaagaacatttgccaagcctagacttggatggggagacagttcccaaagtctcatcttctcacttgtctgaagctctcagtgaagtctagtatgaatgagtttggggagattagggggatctgcactcccagtctctgagatgctcctgttcctgaggagagagtggggtgggcatttgggggtgcaggctgagttttgcttgtggggcccattagcttgataataacagaaataatatctgttttgaatgcctcccacatgccgggagctgtgctaaatgctttacctgaattacttgcgcaagaggtccatgttgttattatcctcacttttcagatgttgctcagtaagagtaaggaacttgctcaaaagaaatagtaaacaagtggaaccctgggcaacgtggcgaaaccccgtctcaacaaaaaacacacaaaaattagccagtgtggcagtgcacacctgtagtcccagctacctaggaggctgaggtagaaagatcacctgagcctgggaggttaagcctgcagtgagctgtgatcgtgccactgcactccagcctagatgacagagtgaggcctgggatcggcctccagcatcctggcttagccaccgtgccatggactccagctacctactgtctgttcttttgaggtgggcaaaatagggggcagaacagtttcttcttctttggtgacatccagagcccacaatcttcagtgcagctgaccataagggccacctctcctttctgtggctgatcaatatgactccatgttgtccagagctgggactccacatctcaaagttgagtccccacagactttcaaacagggcaagaaagggccagtgaagataatcaggtggctagtcaaatggcttataaatttgtccgcaaacatgtggtgctcccttggtggtggtgggtggggatcagaaagcattttgagggccacccaaccctgcccagaccatctgcttcttcctactgtagccacacaagattgatagcaatggaatccagtgggtctctaaccgatcaagaagggacctctaggccccatccctggggacaagtggggaggagatgagaccctgccatggccccaggatgctgcagctttgctgtctctttcctcaccactcccccgcctcacctctcctttcctggcctctcccgccaccagcatctttgcccagacccttttcccaggaggccatgtatttatggagcagctcctctgcctggaatgtagggatccaagagccaggggatgcggtcttcaaagtgccagtgacctttttggaagcagtgtgacagtggtaacaggactgtccatccacagctctggggaaaactgatatggccataaggaaaagctctgcagacagacccgtttgacacccagtcctgctactgaggagatgtgaggccatgggcaagccacatacctcttcacccagaatatggggatgaagacacatacctcactgagttgatgtgagtgttgagttacacgtgaagtagctagcacagcaggtgctcaataaatgtcagtatttcccttttgggatttagcctccctcatctgtaaaacaaggatatgaggcagagcagtaagggctgcaagtggttggggtggctctggatttgtagtcaagagaactggactctgtcccagctctgtcactcctacctggatgactctgggcaagtaacagaatgacacttaatcgcccagataatccatttcttcaccagtaaaataggaatgatcctactcctatctaggatggtagtgaggatatgtgaattaaacataatggtttttaaaagcactttgaattgcaaagtgccatatcaaatactgatggccattccctcagctatgcagtccaaaaggtagggattatctcatcagtccgtattctcccagtcccccaccctcctgtttagcacagtgcctggtgcatggtggagactcaataaatatttgttgactgggtgaatgaatgaaggagagtagctatagtaaccattcagaggatgaggagagagggaggtaggatgtgggtgaagctttcagtgggggtgggtgggtgcatcttgaattgagcctggatggacagagaggaggtggggaatgtgtttctggcatgggggcatgtggtgtggcaggagccaagatgtggggcctgggaaggccatgatttgtgtaatgcctggagaagccaagttgacctagcaggggtgctggaaggaagatctcaatgccctgtctgcatttgccttcctaatttcatgtgagggcccagaggggtctgtggcctggaggggcctaattattctctttgccatttcaacccagggctcttgcagctcctttttcaggcttataatagatgatgctaatgtcattattaatatttaatagtaatgatgctaataatgccctgcatttatgtggtctctccaaagagctcaaagaaccctgagttctttttttatgaaacaatttggctggtgtggaaggtgggagggcaggagggcaggacagtagagagggattgagtcacaaagaaagcaaagccagaaaggtgaaatgattgggccaaggtcacagagcagtggaggtggggctgggctaggactgggtgcgtgggttccctgcctggagctctgtccttgactgccccaggtcatctgggtttaaggaggacgttcctggtggggacatcttttggtcccg

SEQ ID NO: 516 - DNA, 7473 bp, Homo sapiens
ggcatgcgccactacacctggctaattcttttttgttgttgttttttgtttttgttttgttttgttttttcagatggagtcctgctctgtcaccaggctggagtgcagtgacgcagtctctgctcactgcagcctccgcttctgggttcaagctattcttctgcctcagcctcccaagtagctgggattacaggcacccaccaccacacctggctaatttttgtatttgttatggagacgaggtttcgccatgttggccaggctggtctccaacttctaaactcaggtgatccaccggccttggcctcccagagtgctgggattacaggcatgagccaccgtgcccagcctcttttccgtttttgttttttttttttcctttggttgtctggtttggtttttattatagcctttctagtgagtgtgaagtggtatctcactgtggttttgatttgcatgtccctggtgactaatgatgctgagcatcttttcatgtccttattgaccgtacatatagttctttgagaaatgtcttctcagatcctttgcccatttttaaatgggattgtctttttttattaaagagccagagatctgaagtctttttgagttgtaagatttcttcatatattctagacagaagtcccttataagatacatgatttgcaaatattttctcccattctgtgttgtctttttacttttttgatattgtcttttggtacggaaagacacttattttgatgaagtccaatttatctattttttgtttggttgcttgtgcttctggtaacatatctaagtgggagccaggtgcagtggctcatgcctgtaatcccagcactttgggaggccaaggcgggaggtttgcttgagaccaggagttcaagaccagcatgagcaacattgcaaggttctatctctataaaaaattaaaataatgataaaaggaggccgggcgtggtggctcatgcctataatcccagcattctgggaggcaggaggacaacttgggccaggagttcaagaccagtctgggcatcatggcaaaaaaagaaaaaagaaaaaattatcctggcaaggtatgcctgtagtcccagctacttgggaggctgaggcgggagaattgcttgagcccgagaggtggaggttgtagtgagctgagattgaaccattgcactccagcctgggtgacaggaatgaaaccctgtctcaaaaaataaaaataaaataagccaggtgtagtgctgcgtgcctgtactcccagctactctggaggctgaagtgggaggatcacttgagcctaggaattcgaggctgcagtgagctatgatcataccactgcaccccaatgtgggcacagagcaagaccctatctcttaaaaaacaaacaaagaggggcggggtgcagtggctcacgcctgtaatcccagcactttgggaggctgaggcgggcagatcacgaggtcaggagatcgagaccatcctgcctaacacggtgaaaccccatctcctttttttttttttttttttttgaaacagagtttcattctttttgcccagactcccgggttcaagcgattctcctgcctcagcctcctgagtagcggggattacaagggtgtgccaccacacccagctaattttttatatttttaatagaggcggggtttcaccgtgttggccaggctggcctcaaactcctgacctcaagtgatccgcccacctcggcctcccaaagtgctgggattacaggcgtgaaccagcgcgcccagcctcctacattttcttctaagagttttatagttttagctcttacatttagatcttgttttcattttgaattaacttttttgcaggtggtgtgatacagcagtctgtgcagaaaaaagttaacatagtagaccctaactgctaactttatttttacttttattttttattttgtttagagacagggtttttgtcacccaggatggagtgaagtggcgtgatcatagctcaccgtaaccttgaactcctgggctcctctgcctcagcctcccaattagccaccacacccagctaccttttgtacatttttttggtagagacggtgtctcactatgttgcccagtctggtctcaaactcctcagctcaaatgatctgcccaccttgacctccagagatactgggattacaggcgtgggccactgcaccagacccaggtttattcttacaccaatacaacactgtcttaattactatagctttgtagtgagcttttgaaaataggaaatgtgaatcctccaactttttttttttggagacggagtctcgctctgttgctcagactggagtgcagtggcactatctcagctcactgcaaactccatcttccaggttcaagtgattctcctgcctcagcctaccaagtatctgggactacaggcaggtgccaccatgcacagattccttggacatccctgagaggtcaatcatgaaggtcaacttggttttctccccctcatttgggttcagaatttaaagtccacacacacaggcagtaagatgattatagataaggacatcatcactcggtttcggatgttaaattgtctaggtgggttaggggtgatttgagatcacacaaccttgtgccacaaagaggaattcccaggccagagggagacattttattgccatgttatgatcttatcattgagttgaaaggcaatcttgtttcattttggattctttcttatgtttatgtcttataagggcactttgaatttccaagcaaataataattttgaattagcttttaatcattgacttctagcacagttatatgatcagaaacgtgctgtgtgatttgattgctctcaaatatattgagatttgctggaacaaaataagtcaggttaatttttgtaaatgtaccatgcttgcttaaaatgaatgtatctacatttgttcctgagatacgggttgatggacggatggctacatggatgtgatggagatggtttactatcgggaccttccgcatcctgctgatgttttgttgcttaggatatgaatggctgagcggaggctgtaaaacctggcactctgcttgggtatgaggttcttcctgccatcctgccatcatttgttttttatgttttgtcgccaaaagtgaccttgaggaaccctgggagctcaggaaggaaggagcgcccagaagcagggacagggagctggttggggaggaccagaaatcaggtttgtgaaggttccagagaggacctgtccttgcgaggagtgtgggagactgagatgggggaggggtcattggaatgatgcgggcgctacttggcattgtccattgtgaggcaccaccggggtcatcagggattggtggagagggagtataaagccccaggtttgctaagggagggcccagaccgaagaaggtttggcggatagcagaacctttttgtctccctctaattgctcctaagcctcacgctcccttgccccgcgtgtcctgttgcttccctgatcttctccgtgacctgtagctaaaccttccaccagcgcttgagaacttaatttgaaccggatcctttcccagacccctttcttcttctcctcctccacctcctccaggtgcccaacagcccccttctcctcctttcccttcccttacttccccccttcccctccccttcccctccccctcccctccccttcccctccccttccccttcccctccccctccccttcccctccccctccccttcccctccccctcccctcccccgccccaactcagatccggccccggtccccgtccccttccctcccccctgccctaagccacctccacctctgtcctggccgcctcagggcaccctgaaaggatcaggacatgcggctgcgcttttggctcctcatttggctcctgctgggatttatcagccatcagcccacccctgtgagtagacgctggacccgcggggtttcttcctttttactgggctgtgtcacgcggcatgaaattacacagctcaggcctgtaatcccagcactttagggggccgaggtgggcagatcacttgagtccaggagttgaagactagccagggcatcatggcgaaaccccatctctacaaaaaattccaaaaaagattagtcgggcctggtggtgcgtacctgttatcccagttactggagaggctgaggtgggaggatcgcttgggccgaggagctggacgttgcagtgagctgagatggccccgctgcactcttgtctctaacaaacaaaatggaccaaaacaaagtgaaatgtcatttgatttgtgtcatctggtttgatgacttttttttttttttttttagacagagtctcactctgtcgcccaggctggagtgcagtggcaagatctcggctcactgcaacctccgcttccggggttcaagcaattgtcctgcctcagcctcctgagtagctcagattacaacgcctggctaatttttgtatttttagtagagacggggtttcaccatgttcgccaggatagtctccatctcttgacctcgtgatccgcctgcctcggcctcccagtgccgggattacaggcgtgagccaccgcgcctggccaaaatatataaccttaagtgtaagtttactaactttggaaagtacatacaccagcataaaccgaccccctttcaagatctacattattttatttatttatttatttttttgagacagtttctcccttgttgcccaggctggagtgcaatggggcaatatcagctcaccgcaacctctgcttcccaggtttgagcgattctcctgcctcagcctcccgggtggctgggattacagacatgtgccaccactcccagctaattttgtatttttagtagagatagggtttctccatgttggtcaggctggttttgaactcccgacctcaggtgatccgcccgcctcggcctcccaaagtgttgggattacaggcgtgaaccaccgtgcccagccaagatctacactattatgtcaccccagaaagtgaactctcagtcttcccagccagtctctttcttatcataggttagcttgcttattctggaatttcgcgtatacagatgcgtgccatgccataggtactcttttgtgtctgctttgttctgctcaacaccatgtttctgaaatcattaccattgttgtatggttctctaactccatcatttccatttcagactcagcatatgctgagttcaacctgttgaagggctatctctgtttaattcaccatcttgaaagaaacatttaaaattgagatgttttcaagaatatatagttaaatcctgaggaatcgatgtagaaatgttatcacaagctgtctgaacttactcaggggaagtcttcgtcttcactcacataagagtctactggaattaatatcaacaatcttagagaaatcccacactattcatgccattttcatgatctccaccttggtaattttttttttttttttttttttttgagacagagtctcactctgtcacccaggctgaagtgcagtggtgcgatctcggctcactgcaacctctgcctcctgggttcaagtgattcttctgcctcagcctcccaagtagctggaactgtaggcacgtgccaccatgccctgctaattttttgtaattttagtagagatgggtttcaccgtgttagctaggatggtctcaatctcctgatctcgtggtccacccacctcggcttcccaaagtgctgagattgcaggcgtgagccaccacacccggcccaccttgttaatttttaagcactaaaatttgatacttatttgtgaatgaagtaatctcttcattgtattttttttttttacttatgctgagcttcaaatgacaaagattcatataatccaagagagaagtattatttagagggattcttttaccatgtgatatataataaatgcatccaatgttatacatcaatttaaaaaacaagtaaataactttaaagaaaagataactactggccaggtgcagtggctcacacctgtattcccagcactttgggaggccgaggcaggtggatcaagaggtcacgagttggagaccagcctggccaagatggtgaaaccctgtttctactcaaaatacaaaaattagccgagtgcggtggcaggcgcctgtaatcccagttactcagtagctgaggcaggagaatcgcttgaacccgggaggcggaggttgcagtgagctgagatcatgccactgcaatctagcctgggtgacagagcaagactttgtctccaaacaaaaagaaaagataattactttatacttagcttgtcttagccatgagtgacgggctgcatgtggcccaggacagttttgaatgcagttcaacacaaatttgtaaactttcttaaaacattaggagattttggccaggtacagtggctcatgcctgtaatcccagcactttgggaggctgaggcgggcagattacctgaggtcaggagttcgagaccaccctggccaacatggcaaaatcccatctccacaaaaaatacaaaaatttgctgagtgcattgtcaggcacctgtactcccagctactcaggaggctgaggcaggagaatcacttgaacctgagaggcagaggttgcagtgagccgagagcacgccactgcactccagcctgggtgacagagtgagaccccatctcaaaaacaaaacaccaaacaaaaacaaaaacaaaaaaaaatggctgggcacggtggctcacacctgtaatcccagcactttgggaggccgaggcaggcagatcgcctgccaggagttcaaggccagactggccaacatggtgaaacctcatctctactaaaaatacaaaaatgagtcgggcatggtggcagagacctgtaatctcagctactcgggaggctgagggaggagaatggcttgagcccaggagctggaggttgcagtgagccgagattgcaccactgcactccagcctgggcgactgagtggagcggaactctgtctccaaaaaaaaaaaaaaaagagtttttttttagatcatcagctattgttagtgttagtgtatgttatgtgtggctcaagacaactttgtttcttttaatataggcagggaagtgaaaagattggatatccctgctttataccaagaaagacaacaccccacatttgcaatgcctaaaaacactaccagccatctgaaaaacatgagacttctaacttctgttcttttttgtagcagtggaatcccacggtgatatctgagggatgtggttaccttttggaggaggttgacggtttctaaggatgattctttctgagtgaaatattgtcggtgtcattgaccttttcattatttcaactattattattccaggttatcaatagtctggctgtctatcgtcatcgtgagactg

SEQ ID NO: 517 - DNA, 2017 bp, Homo sapiens
taaaatgcaaagcctagtgtcttctagctttttgaagagcttttgtccattatataatctgtcaagtagccaagagttcctcagaagcaggacatcatttagatttaaaacaattatggcttgtctgtaaaataatgttgtagcataaccattcatgggatggcagctacgattttacttcagtaaaatatccttggatactaccgccattttatttaccttaaagattttaccaaggtaccctagaacaaaaatggtgaggtcattttgattctgctaaagttggtatgactggaaagccaaatgacacagttatgagcatagaccttttattttccagatgtttgacagtgtaaacatacataaaatacatattaaagtttagatgctttatattttgtgcaataaattgaagccttaaaacatttcattttttttataaaagaaactcattagtttacttaattaagacagtaaaatagcagcaagtaccaagacattgtgcatttcttttatttaagacaagttacttcatttacatcagagttagaaatgttaagactggctttcttgaatacttaaatatagctcgaatcactggttagatatggacatattttcccaactgtacatcagggaggagtgctttcattagtttcagaaaatgcagaccctcagacagccagcatgaccacaacattgagcaataagagaaatgaagcatttactttccaagcatttgccacagaaggtaatggagtctttacatttgtggttgtctcttccctccataagttaagggttgtgctttgttgaggcatttcagagaaattatttggcatgccactagtgatacttagggtcatgggtgttggggatgattttgttgagctagtgaggcttgtgtttgtgaccattccatcttggagatgaatagttagagttgcagctgctgcttcatgtgaattgatagtctctgtggatgtatcttctggatagggcacaaaagccttatcagtgctagtaaaggtggtgtctttgcttagagtggcaccaaacgttgtttcctttgttcgatattgtttgggtattttggtcactttgggttgagttaccacactcagagagttaatggtgtccactgtctgcatcccacttacagtgaataagcttgaggtaaatccagaaggtgtgggatacatgttatgttcctttaaagatgatatttgggtagaacatggagtccctatcacatgggcttttgtttccatcatccacttcagtaagtaagtaatgttttgtttgtggtcacatgaccacctgttattgtaaagggttatctcttgcaactgaaagagttggtcaaaagattggtctggaatgaatgtgaacttattgttgtgcaggtaaagatgtgtgagatttgtcaggtttattaatgtacctggaagaatttgtgtcaaagaattattagacaggtccacgatatgtagtttggagggcatgttggttggaactgtccaaagtttgttactactgaggttgagaacctcgagacttcttagtgtatttttaatgaggacaaccttttccagcatgttcttagaaacatccagatatttaagattccactgataagcagtatcagatttgtcaagaagtttaatgttgttgttagcagcagacatgttccacagagaccgaggtaagtgagcaggcaggctttcaagcctgttgtttgaaatgtccagggtcctcagattggtatattgggttaactggttatgcagatcagtaaagtggttataagacaggtttaaatgtataatattctcttgcagtccagatggtaatgtagacaagtttctgcctgaacagtccacatgcctgtgcctctctgtgcatatacattggagaggacaaatgcataaaataccaggtgtgagaaacagaaggatgaacaggcagagagacattttcaatatctgatattccatcaaagcctagaaacaaacag

SEQ ID NO: 518 - DNA, 93494 bp, Homo sapiens
aacataatctctttactccagtgaacatttcagattcctctagcttcaatgaaaatatcaatatccaattcaaagcactctctcaatgtccaggacgggtcttttaaaacaaatccacacagccctttccatacttctgaataaaatgaactttcctgactttcctcacatgcacacttctgctcatttcagcaggattccaaagcagagagacagcatccggaatgcctgagatcttcgggtgaacggaagaggtgcttcagaatgtttaagacccttggctctgctactgccgtacgaacttcttacggaggagacctgatcaaagtcaaacaaaccttgattttacaggaacactgcaacgtttttaagtagccatatctttacatatttaaatattatttaagtaaccatcataaacatattcaaataattagatttatttgaaagtctgctgtatgttgatcagtataattccttggagagtgacaaatatttcaaatatattgccacaatatcattgtaaaagtttaactaaaggaatttggccctttttattaccctgaacaagaatgtgcaaaacaaagatgcaatggactgtatatatcttaactgttgctgagtaaacttaccaataaaagccaatagcaatatctccagatcattgacaagaaagagttccttgcaatatctttatatattagccttattgaatgatggttacataaatataaattgtaagaatgtttttattgaaaggaaaacttacagggcatttaaattatatttatataatttatatacatttatatttataaatttaaatttatacaatttatatacaaatttttaactttggatgtttgtgatttttctgtctctttttcttgggggggagtggggacctaaaccctatggagatgtataatgatttaaaaaaataaaaacatgaatgtaaactgtgtatcactgaaatgacgtattttactacagaactataccttctatggcttccactaaaaatataggatacattggtctatcggtcagagttttgaattttttttttcaatcattggtttataaatagcatccatcttgctttccatcacaatcatgcctgagtgagtgtagaaaaagttgcattcaggaatatggtaaaatgttacaggaagatttatgccattttgaatggattgtttcaggttgcctgaatttttaatacccctttcttgtcacagagaagagaactttgttatttttggctttcattagagttctcacttcagagttggttagtatgggtttctgctttccaagctgacatctcttttctatttagcatctgttacataaacagggtgaatagctacacggttccaaaattgtgagtgaagcagctaacccccttcttcctcactagccaacataactgacagcacttagctctctccatccctgctgtcttagctctgaagggactccgtagcactgcctgcctgactccgcgccactgacggcaggcagtgttgttgggaagagagcaaaggcagggagtctggtggtgtgacgatgaagataataaaggaaattattaatgcgtctacagtattttttgcatatttatcttactgatcctcacaccatccctctgagaaacatgttattattattacctcacatttttagtattctgtgtacatatttttaagttctatgtacatatttgtaaaaaaaatttaagtaaagcaggagagaagaaatactctagataggagaatttttttttccactcttttgcagacagtgttaaggcaggggttgggcaaatcaaaatgccttaaacacagaggaaaatatttatcttacgcaacaagaagcttaacataggcagtccagggcacaatgatgtcctcagtactaagcactagctgtcatatttctgctctgctgtcctcatagggcactgattcatcctcagcttgggtgttcatagtcataagttggctgctgctcttcgggggtcgcagtcacgttgtcacataacacaggttctagcacaggctcttgaagatagcaaagaccaaagaagtcttgtgtgtcaaattgaactgcaccacctctgagttccagggttggtttaattctctggctccacatagaagcaagatggctctagtctttcctgccactcagatgcaagcacatcataaaacaaatgaacaaacaaatcaaaaattccatgaggctcagagactttaaataatttgttcctggattttgaggcatgtatggaatatggtgccccttgttctgtctccaagtacggtgctctgccgtgaaaggtgtttgggttaagagaaggcagctctctcaggtatctgccgatttgcacaggcttctttgtacacaataggcactcagcatccactgatttgattttaggcttaaaaatgaaattaaaatggagctaccttgggctgtttggctttgttctctctctggcattttcctgtgttaagtttaattgcatttgaaccagactccactgttctggttcaggacaatgtccagaacccagacagctttttctgatctgtttaactctctgctaacatccacacagatggagaaaatcagaatcagtggactcattctattgtttcaggatcctggaccccctctgtaatcagccaattcatctaccctttttgagcacctccacagtactactccattctagctgcttcaaagtatacaagatgtagtgctttttgtccatgtacttacagtgtatttggagaaacatgtcaagtacatgtgaacaatttgctaactaacaattttaaggtgcattatatgcatcagataaataagctctatgggaagtccagtgcacaaatagacataagatgtgggctggcccttggcagatgaaccggtcacaagaagctctactcaaattttatgaacatggggtttctcagatacctgcctgctgcaccacctggtgagaatggaattgaggcaaacctagggcctggaaaattagggcaattgcttagggctatgaactctatgcagtgggagagcgattcagagagtcagtcttgaggggcaaaggaggatttctatttaggtagatttaactaagacataaagtttgagggatattttcaaacaaagaatcaaccagtatatgtactcattatgcccaacacagagcccccctcaggcaacacagccctctttgtgacttaattaataaacctgattttacttgcctataaatcttaccaggagtagggggtcattggacttgacagcaagaattttctgttttgttactgtttctgcacagcctctgaagcttggattagaaagagaggtgccgatttggaagtcaacaacacagaggtggctattaacaccagaagagtagatgagccatgaaggcaagaaattccatacagaggggaaggctagagatagaacctagaggatcgccaaccacagttcctcttaaccacagacatgactgtggtctttgatgcttcatttgtagagtaaggacaatgatagtatctaccccatagagctatttgaaggtttagtgagttaataaatgcaaagcactggacaattgcttcatagatagacaacactcaatactgttatcaagatgaatcaaattctcactccccctctcccattctcctctctctgcacttttctcctgtgcccatgaaactgccctcctgcctgtaaaccttcgccggatgtttagaaccctctgccaaacatttcttgagtgatgggtggacctccaggcctttttctttactttccacaatcaaaatttaactgtttcattttaaattccaccaactctaccatgggtgttagcattttaaccagacaatgccttcatgtgaaagaatgtctgtattgctgagattttggtctctaacagtgatttctagatacagggctctctttgtacaccctcctcaaaacacacttgtaagcaacctcctactcgtgagacctcgaaagtgggaaaggagacagcagtaaggacgatacagaaataggcacagagaaaccagcaggtaccaaggatgtcatcaagcaatttccacagaaagcaagcatggattaaaagagagaagccaacaaatttgtggtcatttgaagcctaaagacacattttaaaacatttcttaatttctttaagtttctatcttttttcctcctatggaagaaatctacccaatataacataaaccactaatactgttctctaggcagaacatagttccgtgagccaatgcaggctggtttcagggaaactaacaacattattgattttagtcaggcttattagaatcagtgttacatgcccttttcctctaccagattgtatttggacttcattatgaaatctcattacattaagaggaggctgcgatgagttctgtaaataaaaaatttccaaagatggatttgttaaaattagtatatctgtgaaatctgctttgggtatcaatctgtcaagaaagggaatcatatattttctgattagaccttgctttttaaaaaatattgggaatattcaccaattctagcagcatacaggaaagcttcccttgttttcctgttaggaactcctgtgcaacatattgtcacagaacctgggtgagacatcgcatcacataatgattacagacagcttgaagggatgaacatggctttttcctctccatgcagctcagtaacacaataggctcgtgaatcccaaactgagagctatgaaaatggagtcaagtctgtagctggcaatgcctgggatttttagtgcaggaatacggaggactaaaagagattcgaaacacccaacccttccatttctgcttcaatatgtggcgtatcatttggattaggcaacttaagtgaattgataaaattgatgaaaatgaactgatagaggaaattacttttccaaaacaaacaattgcaatatgtacttttctcttagacactcactcctgtgtctgtttattcagtatctgcacgcacaaccttgtaaatactgaagaaaatgatgaaaactgtttagtcagacagcttagtgctttctcgtccaaaattataaccacaaactcaacaccaaaccaagtagtgtggtttcactgagaactgagagagcagttgtgggattttcatttaagaggcagggaatgataaggcattagagtgaacaagtgctgtcgcaaacctcttccctgcatctctctatctgctgccctggtagaaccctgtatccccttgatcccagaatgcttccctccctccctcccacccaggtgacatttaagacctctcttgttagcccagtgctgtggcttatgcctgtaatcccagcactttgggaggccgaggcaggtagatcacctcaggtcaagagttcgagaccagcctgaccaacatggcgaaaccctgtctctattaaaaatacaaaaaattggctgggtgtggtggttcacacctgtaatcccagaactttgggaggctgagacgggtggattacctgaggtcaggagttcaagaccagcctgacttacaaggtgaaaccccatctctacttaaaaaaaaaaatagcaagaattaactgggtatggcagtggacgcctgtaatcccagctgctcaggaggctgaggcaggagaattgctttaacccaggaggcagaggttgcagtgagccaagatcgtgccactgcactccagtgggggcaacaaaagcaaagctccatctcaaaaaaaaaaaaaaaaaaaaaagatccaggtgtggtggcaggcgcctgtaatctcagctacttgggatgctgaggcaggagaattgcttgaaccctgcagaagttgcagtaagctaatcacaccactgcactccagcctgggcaacagagtgaggctctgtctcaaacaaaaacaaaaacaaaaccaaacacaaacaaacaaaaaaacctctcttgttcagggcattgttacaatttattggattcattctgataagggagaaagacctaagcatggagatacagagtagaatattacagtgtgggagagtcacacagacaggttgggagaactctcaggactcagatctcctggtgcagggtaggagttgcagtgacaggttgatttctcccatctcttccgacatgggtttccccatgtgccactccctgtagattagtagtggggtcacgaatatactcaaaccacactagcatgctgggacaatgtgtgtctttgtgttctgtaattgatctgagtctcctttatgagccccctctctcctgaatacttcaagttgccagttagcaagatatcagtcacctctgctttaaccagtctcacttcagcctctggttcatccatctggcctcttcccagggctgcctctgtgctactgatcctgcaccatggggaattggcttggttccaaaggctgaggatgtcctagggacctggagtctcaaatagcatgctggcacttgtcccagcattcctgagttccccgatgactgtaagttttaagttatcatcccctcttgggatatgactccatgacaggaagggggcagagaaggagagttgtctgcatatctagatgcacttgcactctctacctttgcttcttttcttcctgctatgcctcactgctggaaatattgggcttttattttactcattcgtcctatttgatagggacttttcctatatcctgcattctccttgtagaccccagcatcataacctcattcccagtgatattttttggatatttgtcccctttatatctcacgttgaattataatcctcagtgctggaggtgaggccttgtgggagatgtttggatcatgggagcaggtccctcatggcttggtggtgtctttgtgatccagaactctggatcttgaagatagtgagttctgacaatctggtcatttgaaagtgtgtggcatctccccctgcactctctctctcacttgttcctccttttgccatgtaaagtacctgctattgcttcaccttccattttgattgcaagctccctgaggctttgccagaagctgaactaatgccagcactgtttcctttcaagcctgcagaactgtgagccaattaaatctcttttctttataaattacccagtctcaggtatttctttataacaatgtaagaacagcctaatacatccgaacatcattaagatttaaagagagaaaccaattcaccagtagaagattataattcagcaggtatttcaaggacattaaactcattgtccattatgattttcgtaggggtgaaacttgaatggaattataaaatataggggctttgtctttcccatacaagccttcttcaggatacagttggccccctgtatcttcaggttctgaaccaaaattggtgaataataagagccaactaaagaacttgagcatctgcagatttcagtgtcttcatgggtcctggaaccaattctccatgaataccaaaggaccgtggtattcattttccaagacagaatggagatgtctattgccctagatttcatattgttcagccagatatcttgacatcattagaatgtcttaaaattctttaagccagatggacatttactttcgtttaagtcatcacagtatacttgaaaaagtgtgcatgaaatggtaacatgaactataaagggttatcagttcgattgtcatcagcgcgcatttatatttataaaattctcttgcagtggttcattatagccctgaaaagcaaggaagttcctcattactagtttatagagttatatgcacagaggcatgaggttatgaaattagttatctaagcttctacaaaggggagaaatctccttctacttaacactagtcaaacattctctggagaatatgatatgattctggatacaagatatcataaattactgcacattcttggagggcaactgggattcaatcactcaacatatatttcttcaaaaaccatttattgcactctaagcgcttgcccattttttaggtgctggggatgcaatagtgttgtgttaagtaaggtaaataaagtctctgctttgagggagcttgcattctggcaagcaaactaagaaagaggaatataggcaagtatgaagaatctctaaagaccttcaagagtagacctatcagaagaagagaaaccttggggaagggaagctatttgatgattgcaaatagtagaagatctgaactttagaagaggaaggaacttacgtttctattggatgttgctctgtaagacagaactaggaccaatggggaaggttagggaggcagactttgctcagtatagaagaggacttagtaacaattagagttctactacatctgaaagttacaagctcttgagaaagtgttccagataaggctgggtcgccatctgtcagaggcagttgcaggaggctgcctgcttttggagaagagtttgaagatggtctgtgtggaaccattcaaatctatatccttatgattctgctcaggtaattaacttcgaatgtatcacgctgagctcatgacattttgaaaaacaaaatattttgaaactaagacacacatctaagcacacaaagtaatcacaggtattttggacagcaggctaacgcaaagacatcacatggggactattataaaatctggggcctacagggttccagggggcttacaagaacggatgagaagtagaattagagcccgtggggaatggagcaggagagaggaaatggtgtcaaagggttgacaggtcagggccagggacatgggttctgtcattaaacggttgaagcaggtcactttaattccctagtcctcagttttcttatgcgtaagagaacattttgcatcgatggcttcaactagatctgattttctgagatgagaagagaagtatacatcccttttccttgccacaaaagtcttttgactggcaaagccgatagtgagttcagtagggaagtgtcctatactattgctttcacacaagtttactcacatattcatttactctcatccacagctcggtgttcagaactttgggcagtattgataaacttcacctttcatgtatatttgctaataaggtattgcagttagttatttgattctaaagtctactcacttagatgttaccttacaataatggttaagattaagatatggtcaacaagaacaggaaaagatgttcagcatcacgagtcatcagagaaatgcaaatcaaaaccacaagatgccacttcaaactcattaggatggctagaaacaaaaagttagataacaataagcattggcaaagacagggagaaatcagaacctttattcttgctggtaggaatgtgaatggtgcaactcttttggaaaatagcaaggcaattcctcatgtgattaaacaattaccatatgatcagcaattccgctccaaagtatacactttggggggccgagatgggcagatcatttgagatcaggagtttgagacccacctggccaacatggtgaaaccctgtctctactaaaaacacagaaaaattagccaggcatggtggtgtgcacctgtaattccagctactcaggaaggtgaggtaggaggatcgcttaaacccaggaggcaaaggttgcagtgagctgagatagaccactgcactccagcctgggtaacagagcaagactccatctcaaaaaaaacaaaaaaaaaaaaaaaagaaagaaagaaaagaaaatatatgtttctgcaaaaacttgtacatgaatgcctatagcagcatttttcataatagacaaaagaggaaaacaatccaaatgtccatgaactgacaaccagttaaacaacatacaatgtactattatttggccattaaaaggaatgaagtattggtacctgctgcaaaatgggtaaaccttgaaaacattatgctaagtgagagaaactacatgttgtatgattctattcacatgaaaatacagaatagggacatttataagacaaaaagtagataggtgcttgcttagggtttgggggaggggatagcagggtgattgtgaaaagaatactgagtttctttttaaggtgacaaaaatgttctaaaattgtctgtgttgattgttgcacatatctgcaaatatgcaaaaagccattaattatacactttaaatggatgaatttatggttatttgaattatatatcaataaagctctttttaaaaagtaatatttgaatccgtggtttgaaaatagtctctaataaaatacttgactccccaaaccaggttgtaggacaccccaaattatagccttagttcaaataaggagagtccatttcagattccatttgagcctttaaaatctgtattttagtaagtgaggaactcagaccttcagtctctgatgatttggggaaactaggtttgcggaaaaataattcctatccttttaatgctttctgtgtcatttgtcctaggttctccctcctaaagatgcaattataagatgcagaagagtgaaatatctagaagataccccaaaatcagttgctactatacaccctccagtaagcttctatcaaaaaggaaaattttttaaagaaaaatgttataaaagaggtatattatttttaatactatattcttgcaatttaaaataaggaaaaaatataaagagcttcaaaatgttactgtctcttgttacatgacatggccaaagttttacttattggcatttattaagtactcttgtgccctagatgcttttacatacctttagtcataatcctgtttagggttacagaagcggagtttatagagactgcaatttgcctcaaattacactgtttttggtaagtggtagaaccaggacttgaatctgtatctttcagtcatcagagtcttttggtccaaactgcccttgaagaaaatggaccaacaccatggcttgagttctcctattgctaaggacaataaaataatacaagatataaataggaaagctggctactcaaaagatccatccacaaagttttctaacgtaaaaccacctcctgaagtgagttatccttactaatttctaaaagggtagcatcattgccaaaagtcttcccaatccaaactttcttacttttatgctagctgaattcagatggcagcaccttccctctcttgtcattttctcttgctttcaccctacacaaattgctagtggttgaattgccaacacactagagctcccctagtgcttctcacacatctccagaaatgatgtcagaccagctcggctcatgttcatattctccttggctgatgaaatatttaagccatgctgatagcctcagatggcattttagatgcagaatacaccagcctgttgttcctctttgcagaggaacagtaggctacggcgccctgcctccatttctctcccatgtttatgctaagaatgatacttcttcctaatggtgttttaatcaaaaacagctcatcaccaatacttttttttttctttttttacaaaaagaagccatttctagtaggcttggctgacagagtgtatacaattagtaagaccttttagagaaagaatttacagaaaatgctccattcgttgactttcaattaaaatgataacagcaacagatcgagtgaaaggaaacctgttgccattctgtcagccctgtggcaggtgtgtggtgggagagtgaggctgtctttgcaagcacaagtgagcaggtcattctgactgcagcgtttacacccaagctaattgataaagacattctcattttgacccgatcccatggaaaacaggcaaacaaaccaaaaacacttgtcaaacagctatgttaacacaggtaaggttaataggtgtgagagactagactttccttaatattaatcaaaaataatttaggctttaacacaatgcccttgctctttaattttgatggtaaaaatcagaacacttcccttcaatgccattaatggggtcagcctccaagtctgagcgagtagccatgccgtcagtcccatggaatcctaaaaaccatcatcatttgtttctaaacagatcatgagctatttaccatcccagtgttttgtgcacagctgggtgtctggcaagtgtccaatatccattaacatttaaaaattaggcccataatgcatcttttctggggcttgagaagtatacacagtgacacatggtgggaaccaattacacttgcactaccattagtctggctgcattcaacttcccagtaaatgcaggctaatttagtttccagaatggtgtgtctaaattcatacaataatcttagagaaggctgcatatctaaagatttatagtggaacaaactgctcagcaagaatattacttcccacagtgaaacatgagagcacatcacaggacgattcactgaatttctgcaagtttcctttcaatatgtcctttctaaaacttccagtcaggggatgagttggaggacacaaacagactaacagatttcagtaaccatttctgttgccttggtctgcagagctaccatcactttgtatgctaacagatacctttaaatgtgtctttctcacctttggagttatagctgggttaccttaatccatttttccagtggatggacaaattctgcctttggaatagagtactttgaactctttttgggcattgtattaccttattgcccaagatgagcaaagcaaactctacaattggtggtttggtaaaaggttgaatacagagaagttcagaaataaatgctgtctggaaagtgctgttctccaaacttccactgtctggaacaatttctctaataatatccaaggcaaaatagggagtcaggtctatctggaaagcaacccaaagagaacctccttccttgctaggtgtccattccactctcaaaatcaggatggaaactgattagcttctctggctaatcattctggggcacatactgtaccaagcttcttagctcactcagtctatgtcatgctgcttaataaagctaaattgctcacacaaacagaatactgtgccatgggcttttaggattcagaggtggtttaaaaatataatttttcactaacattcagcagaacaatttagcaatagcttacagaaaattgcaggaaagcagtaattttccaaatgtgcacaaactgattcagcaatttacaaattagagactttgggggtggttaggatgtgcagtgagctagcaaagttgtcctctctgagggcagacttcccgtgcctcaggctatgctggggaacaccatttcctttttctctagcaccttgaaatatttaatggcaaaactttgtttggaggttataactgttaagttaaaaattacgttgactgaattgatttaaattggaattgactccaggaaatgccaaggcctctgtaattgaagagtgatttttaatgagtttggagcaaatactagttctctttcagtgttctcttattttgagaagaccgtatactacaatgtttttcattgagaagcttataaacagcatcgaaggtacaactgcctcatcagggctgttgatttgtgcacttactgaattaggagtttgtggatagcattcttttcttattgtttaggaagtatgaatcactgccacagctgaaaatgtataggataggcagttaggcacagtatattaaaataatatgaatgtgccaattgaggaaaacaatgaaacctattatttaataaaactgtctatatcgtatgtttccagatcattttgtagggcgattttagtgtaaggattaacccaattggtgcagattagatgaggagaggcctgatttgagtgagaatattttctttcaataactttaaaaggtatagattttatctataatagtcatttggatatgtgtcttgcttaaaatagctagttcaatacagactggggaaacaggtgcacttatcttttgtataaaatgcatgcagggttatgatctcatcacacatacaaagaaccctttacaactggaatcatgaacaagaaatgtatttccttcaacttaattatttagtttcctactaagaagttgctctgcagaggtcaattatccttcagggatatcctggaagaaatgaacaattagcttgattttctgttgaatttggagcttgaaactcagtatgtgatctattaaaaaaaggagataattcctcttaaaccatgtcctaatctacattggagtcttacactgcaggtaagaaatcagcaaagtaatccaatccaccaccatggggccaagactgagtatcttgatatacaacaatcatggcttcaaaacgttaatggaaaaatctctcatggggagctatgaagaataacagaattcactcctcttatgaagtgcaaagccttatgaaagggaaatgccatttgattttttttaactaaacagaattgctcaaatctgattaaagagagtagcagcaaacattgtaatttggggtaatcaggagagtgtacagttttatggagagatgaaaggcatgagtatggctttcataagcttcagactatccaggaggctgaccgttacctggctctgctctaaaaaaagctttcttgccctaagaaacagaatttaaagtggggactaaattgagttaaaaagcatcctgcacagagcttttcagaaaagcgctgaactcgcctatgtaatgaatctagagaaaaaattattttctctctggaaatgtctttctctttttgagttatttaaacatgggagttgtaatacaacattcttttttatttcagtttttaaatttgaggatgctggtttcagctggctctatttccttggaagtcagggctatgctttaagcttaataatattggatgaccctcaagacctttaaatcaccttcatgtcactgatttagcatttcccctgaggatgcattcatttgttctgtctcagtcctgaaagtctggctttaacacacacataaacgcacatgcacacacacacacggaaaagagatgaaaatatgcagagggttaaaagaagaactcaaaagtatattacggagtaggaacttgctagagttgtgtcatttaaaagataatcccaagcaaatagttttatagccagttgctggctttctttacagcagaaagatctgttttatcaaaaaccactgagtgggtggcagaaataagtctctgcctggagatgaagtagagctctcttaaatggctgctacttatgataccaatgataacttgtaataatgcataacaaagagcaccctgaattcatttaaccaatttcaataagattgaaacacttttcacacattttcatttactttttttttttttttttgagacagagtttcactcttgtcacccaggctggagtgcaatggcgcggcctcggctcactgcaacctctgcctcccgggttcaagtgattctcctacctcagcctcctgagttgctgggattacaggcatgtgccaccacacccagctaattttgtatttttagtagagacggggtttcaccacattggcaagactggtcttgaactcctgacctcaggtgatccacccgcctcagcctcccaaattgctaggattacaggcctgagcctccatgcccggcctcatttacttttacagcatgctggaaaagcagagtgggcagatcttacttctccctctgcagtgaagagatgtgaagaccagagctgagaatatgtgaagtgagacaagattaggtgcttctggttgaacccctttgagttatttttttctaatatatatccctttcaacatttttctgtgttcaatttcacactgtttcccatctggcctaagtggatgggaggggagtcccaggaattcaactcaatctgaaagacatgctctttgattttaatcttcccttttccttaaactcaacttctgcagactaccttgacatgacctagtaatcccaagccatcagactggtgtccaatgtgaccacaagagattttatgaggaaatgtatggtctgaccactcagaatggacgtgtttttccaaaactaagcaccaacctacttggcagcttaatgtgtcctaaaggattgggtaaagggaactatcacagcttttggtgtcagacatacctgggtttaagcaatggctgatgcttggtctgagtcctcacttcaccatctgcaaaatggagataagatcagtaatcacctcagagagttatttattttagtaaagaggaatgagataatgcaagtaaaacgtgtctgtaattatagtaggctctcatcacagacccagcctgaaccaagcaacttacatcttcatgatccatattagccttggactcagtgttttctccagccttgtctttcctgtgtacactttcttagtcaaagttcccaagtcctaactttttgttattccatgttgaatctcacaaaggaatttcccaagtatactctttattttgaaaatatattacctaactcgtaaagtcagaaatttttcttcggctatatagcttccgaggtttttctgcccaattgccctccagaatgtgtaggttgaattagatcaagcttactgaggaagccaattactaatttccttcctatggagaagtgaatttgccacgagaaggtctcacatctcataaaactgcctgtgacggtgtaaaacgcatcatgggagtttccaaatgcatttctctgctttgctacgagtattgaagcatcagagaatattaacagtgacttggagccccaaagtcactgctcagcccattttccagatgaagacactgaaacataaaaaggtcgagtagttcttcagttaccaaaatggagaagagccttgaactactgacctctagtgttgtaccttttgtatctcagaataaagcacactctttaataaattatttgtgaatacaagtttgaaggcaatgtctattcataaaacaactgacctagttaatctaggcaatcaagttaattaaacaattaattccttggcaggtgaaaggagggcaagttgctaacaagcaaaggactgctaaattggctgtttggccaattgtttgatgaaatcatcctcaagtcagtccaacagtcatttcaacagccttctagatacaagacagatcaggaggtgatctgtctccactgctgtgctgaatgaatgggcagtggtggtgatagtggtgggccatccaatttaatagaatgagatgattttcattctttgggatttacaggatgcataattgtggctagtcattaattttttcttattcaaatggaggttagttcttgatgagccgtcacacatttctttcccttgcacagtgatttatttcctccattcatttttccttcagtgacactttctttttcctaatttttttttaactttaagttccaggatacatgtgcagaacgtgcaggtttgttacacaggtatacgtgtgccatggcagtttgctgcacctattgacctgtcctctaagttccctcccttcacccccaccccccaaaatgccttgtttcccgccctgtgtccacgtgttctcattgttcaactcccacttatgagtgagaacattcagtatttggttttctgtcctgtgttagtttgctgaggatgatggcttccagtttcatccatgtccctccataggacatgatctcattcctttttatggctgtgtagaagtctatggtgtatatgtaccacattttctttatccagtctatgattgatgggcatttgtgttggttccatgactttgctattgtaaattgtgctgcaataaacatacgtatgcacgtgtctttatagtagaatgatttaaattcctttgggtatatactcggtaatgggattgctgggtcaaatggtatttctggttctagatccttgaggaatcaccatactgtcttccacaatggatgaactaatttaaattcccaccaacagtgtaaaagctttcctatttctccacaccagtacccattgtttcttcactttttaataattgccattctgactgaagtgagatggtatctcattttggtttgcatttctctaatgatcggttaaagtgatgcattttcacaaggcctaactatattagttcattttcatgctgctgacagagacatacctaagactgggcaatttacaaaagaaagaggtttaatggacttacatttccacttagctggggggtgcttcacaatcatggtggaaggcgaggagaagcaagtcacatcttacatggatggcagcagagcaaagagagagcttgtgcaggaaaacccccatttttaaaaccatcagatctcatgagactcattcactatcatgagaacagcacaggaaagacccaccacataattcaatcacctcccaccagattcatcccatgacatatgggaattgtgggagttacaattcaagatgagatttgggtgaggacacagccaaaccatattactaacaaaagatggacaaccaactcaagtgcaaagttaaatacaactgttcaaaggcccttctccagaaattaagcagatatttacatgacagccagaatgacaggagaaatcagtcaaaggtgattttaattttttctctttctctttgcttctagaatcatacatttttcctaatgaactgagagagatgaagctgcctctctgatagtaagtttcacaacactcagaagcacaagatggctttgactcccatttctgatttcatcctgtcattctttttcttttacagacatgtttttttctcatcggtctctgagagttaggaaatgtttcaaaggctatagcatccattccatatatcttagttgtccccaaatgggctctgcagaattatcttcactaatgtagggccagcagtgagctctgtgacaactacttatgcaccacatttctgggtgcctaactactcatatcacatgaaagccctaggtcttccacatgatggcacataaacaagactaatccctgaatgtcaccagctcagaggcacctcttgctaatttgggaattcccagttcccctccccctgccaacttgattctctaattatgtgtgcaggcccaccctgggatacagtcatgtaggatttagtctttcaaattctttgcaaggtgtttccctagacttggctgtgtcctgaggaggaagactgctcagctcagcagtaatcttgtagtttggtagcctttagggggcttgagctgcacaataatgggggtggagtggggctggagacccactagtggagagagaaagaaaaggccttctcctcaaatctctgttgtgctttgcacctgggttccagagtaacttaatttgggccctgtgatggttaatattgagtgtcaacttgattagattgaaggatgcaaagtgttgttcctgggtgtgtctgtaagggtgttgccaaagaagattaacagttgagtcagtggactgggagaagcagacacaccttcaatatgagtgggcaccatctaatcagttgctgggaggctagaataaagcaggcaggagaagatggaagagcagacttgctgagtcttctggccttcatctttctcctgtgctggatgcttcctgccctcaaaaatcagactccgagttacttggcttttggactcttagacttacaccagtgatttgccaagggctcttgggcctttggccacagaaggctgcactgtcggcttccctacctttgaggttttgggacccagactgatccaccattggcttccttgctccgcagcttgcagatggcttattgtggtactttaccttgtgatagtgtgagtcaattctccataataaactccttttcatatatacatctaacctactagttgtgtccctctagagaaccctgactaatacaggcccagaattgcataacatcatctatgaataaagctctttttgtcctaaagtctccctctctttgtatttcagactgatgtccaccagactggtggtgagaggagaatgagtgggtgacccgaaggctaccatgccaccacttctgctttctctttttctatctcaacacccttcaaatatacaataaccacagccacactgccgtcccccaaatgcttctttgagtaaaaattcaagcctccttgaacattaactcgtggaaatgtatatacgtgtgttggggtaggatggagaagcagatggatggaaaccttcttaccttgaagtgcatgagctgagtggggaagaaaatgaaatattggagacagctggctaggctcttcctgtaagggtgtccagttctcttcatccaatgggccaggctgtttcccaggttgtcagagggtaaatcctcttcctcgtcagccagtctacagtgtggctgactgcaatgtctgcttcactgacttccagaacaaacacactgatgaacgttttcagcagctctttactgaagcgttcatgtaattgctctctaaccacagagtcaggagacgagggcagtgaaattgtggcgcttgggcactgcacataggcctttaggatattccaagtggacaccttattgttcactaattcaccccatgctctgtgcccatccttttaaagcccttccccatctgtgttcccagcatcattcttatccccttccattttcctccaataggccttgaaattcaacaccctggccagaataatggagccatagtatccctgacgtgtccagcaaattctgagacgatgggtctcaggcctttcctgcctatcatggctttttccttctctccagtctttcccagaacacagaataaactttcacatagagcctgctggttctgctgaaagcacttccccctcccctcaccacctgccttccttacccttctcagatgctttcctttgtaagacactgtgcctaatctttgtggtgggtttatatttctccttctcagcatacctttttttttttttttttaatttgagacagagtcttgctctgttgctcagactagagggcagtggtgggatcttggctcactacagcctctgcctccagggtttaagcaattctactgcctcagcctaatgtagctgggattacaggtgcacaccaccatgcacagctaatttttgtctttttagtagagatggggttttaccatgttggccaggctggtctcaaactcctgacctcaagtgatcttcctgccttggcctcccaaagtgctgggattacaggtgtgagcccagcctccacttacctttgaccttggtgttttgttttgtttttgagaatgttcctggccttatttgttaaagacacacttgatccctccctgcctggattatattctgaaattctaaatttccttagattaattcacatgaatagcaccaaatgcaaatctcttttttctagcccccgaatttctttctgacacacgactgtgggtggaggagggaggaggactcaagggtcagttttcacccgatagcagtagaggctgtgctacctaaggagggtggggtgggatctgtaccttgagagtgcatgttaagttttaaacatgttctttcgtcttatgaaaaaaattactgaagacactaaacctttgtcttaggttgagtccctcagaagcagcccctgagacaacgatctgagcataactcattcatttggaaggtggtctcaggaaacactaacaggggaatgaagaagtgagtctggaagaggatgaaaggaagccacaaagtgtgcggggctccctctcctcccaaaccctgggagactgaggaaattaccacagaggtgttgcccaaggactgggaatggtggccatttttctcctcctccattattgagtgctgctccaggagggattaactcccccagcatttctggcagcccctgccctctgttagaaaccagacccctggggcagagccctaggtacttgaggttaggcgccaatagcttatattaggacagtcacagccccagcagaggggaatgggcaggacactcacttccccatctgttgtgccctattcaaagacatgaatagaaacacacttttatactttactggtcagtgacccagaaatgcagggaaccctccttccctttggtcagaaactactccatgcggtttgctggtgtgattttcaaaatgaaagtccttcccacaccccctccacagagaagggtccagtgaggagggaggaagtctgctggagttttatatcacctacagtcagtgttctttgttttgataactcctaagaaagtagttagtgtctgattaatgaaaataaatatttattaaatggaagaataaataaagaaactgggactgaagccaaggacacctgatcccaggagttgtgttcttttcatttcattcagtctttaccttgttagggaatccctgagctagggagactggaaacagtggttgccaccagtggtggcaacgaagtgtccctcactgggaatttgcagccttggctgataatgcttttgtgtctctacaactgggacctgtaaattggcctgctaacctcaccagaatgcaaaaaaccccactctattaagggctgttgaaaaatcaaccaaaatgtcaacactcttaataacagatctattaataattcaaatgttttagtaacaatataagcatttcctcacattatatcagaaaatttgacaatgtttgcccatatttataattgtggtggctttacttttcagaaacagtatgattattaagcacaaatgcatttgtttctgcactgaatagcctggcttgacgaaaatattccaaagccaatagctcttatttaaataaataaaatttgtctagaaaacttctgaattcattccaagaaaagggaagctatgtttagcatagagctagtgctgtttatgtgtttttgtttcttataattctttcataactggttatggatggtaactttctattcgggatgcattctattccgctggctgtaataggtaacagagtttccatggtgtaaatttgcatacacattatgtagttcacatgcatgcacatttacacacttactacatttgtttattcaacaactacttatttgctgattaacgcttttgtcattaaatgtacaaacttatttgagggccacaataagataattgctctgttaaaaaggaaaacacagtctttgtcttaagaaagacctaattcaaatcccattagctgcttaacattgagtaagtgacttacacccttcaactgtcagtttctacatctgtcagattgtgatagataatccttactgcatgattgatgaaggttaaattagataatacatgtgagtaaattagtacttaattctatgaatgactttataaggttgatattactatgcatatttttacagagaagtcaatcgagattctcccaaatatgagtcctccaatttgcacagaatggcacctatgtagctaacccactgagggcacattctgattttgccctcagtgtgttatttaatgggttactgagtgagatctgacatctcactttaaagttttcagggttacatagaagtagcaagaagattcctcttatctcagatgacactacaattgttcttatcagggaagagacatagaatctcttttttatcagttagatactcattaaggttagcaaacttttattgattagtgaaggagtgtgtggctggttaaagggatagtagcagcttaactgttaactgcgaagcaggggacgcctaaacacttctctaaaagtatttttatatattttttgctgggtttcattaaacatccagcatcaaggcctaagaaggctgtttaaatatttgaaagaggattgattgtgtgttttgacatagttgtccttttacaggagtatcaatgattgtatggattggttgtcggtttgatgtacttgcatgagtggtgttgacaaagtcagaatattcctgaaagtacatgtttggcttcaccagcagcattttgtaatattgaggtaaatatttttctttgtgtgtgggaacacatttctaaaatgacaaaggaagagagtgagcctacatgatttttgtatacaaatatttatcttatagacaacttttcaggaacatttagtgcataaagccaagtagatctatatatcgatcaggctggctggtttccaggctaggagaacttgattcctctcccataaattcactattctctttatagtcccaggattttcactggcagcatttctcccaaggctacaaggcctttgccacctacttgggcatgggcgaagaagaagaaaaaaaaataaaggaagaaggaggcatgtatagaacatttacaaagcataaaagtgtttacctttgatataatttttataagaaacctagaagaaataatctttgtatttttttctttgatttttgtcctacttttggcaaaagaaagaggataaggcagcgatgaggtgggtttggagcttggcccacctgcactctcctctaccctttacttgccatccacgtggcctggcttgaaggaattctctccagtcttgagtgcaggctcattccctcaaaactgggtacaattatacgccatgtggggttgttgtgaagattaaagaaaagtactcagcaaacagtaagtaattaataattttttggctatttttaatttttaacaagaatatgatcacctctgggatggcagaatatctactacttagaatatagtattagaaatgggcaagttgctaaattttgtttttaaccttactattgactcaccgtatacttggcgttaataatgcagttgtttaagttacatagaaaatttgatgttgtaatttggtgatgataacatggtcctaaagtgttttcagaaagggatttggaggtaatgagggagggaacaggtcacacagagccttgttgaccattctgaggactttagctttgacttttaccacttcaaggttgtaagtaaaggtgtaaaatgacctgaattatttttttaatggactgttctggtcgctgtgttgatagtagcctatgactggaggtgggaagggaaatgtaagggagaaacaggatgacctttcgggcagatagtacagtaagtaatccaggtgagagttgacaatgactaggatcagtatgattgcagtggaacttttgagaagtaatcatattcttgatatatatgttcaaagcagagacaatagcattgcagatggacttactgtagggtgcaagagaaagaaatgagtcaaaagtcacttccaagtttttagcctacgccactggaagaacacagttgccctcagtagggatgaggggaactgaagtagagtagattcggggtggaagatcaggtgttcgtttggtacatactatattttaaaatgtttatttaattcaaggtagagatgtcaagtaggcagtcagaaatgtgaaactgcagtttgaaaacaaggtcaggctggagatataaatgtggaaatagcttgcatacagatggcatttaaagctacagactggatgagatcaccaagaaatatgtgtggtaaggaagacagcaccaagggctgagccctggaagagtttactttcattaaatgatgtctcctgaagattaaaggaaaagcagcattattcaaaagaggccatatctacatttgatcactttcttgccttgtaattgcaaaaggtttaagtcctcctgcttttgccaggattccgctgaaagagaggctgcaatgggactcagaacacaataccccaaagtatggcattttgatatgctgagtactttaaacttaaggacattagaagggccttatgagcaggtcactctgaccttctgttgcctttctgtctcctgccccattttctccccaaaaagggagtcatagaaaccagaattccttttccccaatgtaggtcatagaaattaggattcctctccctcaaaccaaaccataaagtctacagaggttactctttccccaccccttgaagattccagaggcatcctgccccacacctgagaggaaggaatgctatgcaaggaggtcaaggagaatctgaacagacaggcctcgctgggtttccctcctcagtctattagcacaagttcataccttgtgcaatcacatctctacacagctgttcattcttcattgaatctaagcataaaaatcgacagctttcccttcagaaatgaagatctaaaagccctatcttcatttctgaagatctaaaagatcctatgtcacacaaaattttgattaaatacatctgttatgtttttctcttgctaacttgctttttgctacgggagtttcgactatgacccttatgatcagtgaggaaaagtattaaaccttttagcccttacaatagtaaacaccagatacaatttaatctctttaattgaatgtctcttaactgtcttggacttgtatctggaatatataaagaacaataataatttgataatgataaaaccaactctcaaataaaagatggaccaagatttgaactgaaacttttccaaagaagatatgaagatgacaaatgagcacatgaaaagatgcacatcattagtctttatggaaatgcaaataaaatcacaatgagatatcattaactaaatggttaaaaaggaaacatacccctcccctgccaaaaaagccagcaaaaactgatagtaccaaacgccagggtggataaagaacaaccaggacttatatattgttggttaggaatgacaaaaggcacagccattttggaacacaggcagttttttttttttttatataaagttgaacacatactcgccatatgtgtttaactttataaagttaaacagcaatccatatttaaacagcagtccatatttacccaaagtgggggtagaaacatggtcatacaaaaacctgtacacacatgttaatagtagctttattcatatttgccaaaaactggaaactactcgagtgtccttcaactggtggatggttaaactgtgatacatccttacgatggaagaccatttaacaagaaatagaacaaattacggacacacacaccaaagtagatgaactcaaatgcattatggtaagtgaaaaaaatcagacttaaacagctacatattgtataattccataaggataatctataaagacagagaagtggctgttgaggactgaggttgtggagaggggttgagtacgaagggcacaagtgaatatttgcaggaaaggaaaccattctacaccttgattgtagtagttatattattgcatacctttgtcaaaactcatggaatgatacaccaaaaagggtgaattttactatatgtaaattatatcttggccgggcgtggtggtggctcacacttgtaatcccagcactttgggaggccaaggcgggcacatcacctgagttcaggagtttgagaccagcctggccaatatggtaaaaccttgtctctactaaaaatacaaaaaaaaaattagcccagcgttgtggcctgcgcctgtagtcccagctgcttgggaggctgaggcaggagaatctcttgaacccaggaggcagaggttgcagtgagccgagatcaagccactgcactccagcctgggagacagagccagaatccatctcaaaaaaattaaaaaataaaaaaaaatatatcttcatagagctgattttttttaaaaaaatagcattttttaaataaaacaataaacagctacaaaaatataataaaataccagaacaaacaaaaaaccacatggcttttagtgctgaactttttgagttaactacgtcaaaaagtcaagagaaagtgagttaccatgctgaagtctttcccaaaggatgggcaagaggtggagagttattgtcctctttcatttgcagcatccaggaacactttgaacaaagccagtgacacacttgctgtggacctgttggatagcacattcgcctcagtgaaagatgaccccacctaatgtactataaagtgtcagcatacaacaagcttgttgtatttttagatcccagactcagagactccatgtatggtattttcacacggggtgaggttgacccaaaacaccacaggcagattctctggagtaaaagatttttaactacatgtcagcaatgattagttacaaagggaaagagaacttgccccacttgacactaaatgacagaacaatttgacaaaagctaaaaacaggaaaaaaatcagtccttaagacaagaggctgatccccagtagtgttagggacaagtcttttgattacatcttttgtcccacgaataataaatccctaccctcaaaagtctttctaggctggtctcctagattttggcctggtgacctccaaagtataatttgcagagttaaaggaatctgacctgcatttaatatttagttcctatgtatctccacaaagtatattctggagagggagccatagaatttcattatccctctacataccaggtacagcacagacaacatgttctatagttttttaaagacctgggtagccagttaaaaccctgattactgaagatgctctttaaaacctcttgacttaggcctctagcctggttattgttaataattgtgatgctggctttctgtgaaagctcaatcacaatatttaatcatgggacatgcaaggctttgctagggatagtgtgcagagacaccagacaggcccctgtcatcagggctggcattggggtgggaagaagcaggacttaagtataaaatgataatcgtcataatgatggtaattcaaagtagcatacaccaaatcacaaatgtgtggtaggaagagcaaacacaatggagaagtagcacatcataaacagaggtttgagaatcaaatgtctctgcccttgagtccaggttccattcctttttagctgaaacactggaaactcacataacttctctaagccttcatctctttatctataaaaaacagatacataaatttcactgcctaaacctgtaagaactaaaggggatcatgcctataaatgtttaaggacagtgtctggcatggaaagcactcaggaagtgttaactcttggtggcagaagaagcagtaataggatttgaaataagcagtgacttctgcagtggtacatggtgtgtacttctggggaggtcctaggtggaactataaatttggaagtattaaatagtacttaaaatgatgggctggagggagattattcaaggagagaaagtagatgaaaaggaggataaggtctcgtctggagcccttccgcattccaaagttcagcattttggaattggaactttttcctcctttttccttttcattcattttagaataaacctctacaacattttacgaattccccacaaatatcacagccatggaattagagctctctacctaaatcctgacaggcttctccactcactttcatttctgtcactgttagtggaacgtggaaaaataagttacataaacttccgttggcttatgtcattttagtccaggtctccattgtcaggttaaaggttgaagcaattatctggataattcaggtagaacttaccaggcctctgggacccctttctccttctgctacttttgcctgagtaaccagggaatcacttcaatcctttttctgctcatgtaactctggtctgactacgtctttacccactggaccttgtcactgaaacaaatatatcatattggaaacaaataccagtgagggaaggcatgctcatttcaaatgtgggtgtatttaatttccatatggactatgctgtgagccagtgcaaaaggcagctctaaagcataagggataaatgaaggcagacagtcaggaactgagtccttgtcagaataaaaggaaatcaatctcacaaaaggtaaaggagatgaattttcttgacaagagcctgtatcaccatttattgttatttatggctttttgggagaatagctagaatactaaaataaggaacattttggcccatgtcacaaaacaccatgtgaatttacagcctcctcgttagagatatttttctgatcaagaggcagcacatcaccctcatgaaaaaggaagtggcggggagggggacagaaaagagatttttgatggaaaagcctggaaagttttacttgtttaattgcttgggttgggataaataacagcagagtaaatgaaaatcgcactagcaaaggataccctcctgtttgtgtgactgaatatataagtccatgaaacttatggtggtgcccaaatagagagaagccactagctctaactcaccattgaccgagcctgtcagatcttatcttaatgagctacagatcccaggacaggagaggaacaaaacgaagccgtgtgataaggtacatagtgccgtaattggaccaagctgaggcagcggtgttcctcaacagcagctgtgggtacaaatgaaagggctgtcagtcgcaaataatttgctatgtttcagttttcacttttgtccatagggtaggatgtcagaagaaaagtctaagagcatagctttcccttctgcatttgcctgccagcatatttctctctatccacacttcagcaaatttaacaacatgacaaatctcgagatgtttgaaatcctttatttacatgaatccaatatactttctcagatcttacaaccttactctgcatccagtaaattccctatgttgctagtgcactgttgcaatttgcattgcattttccatgatttgccagtgttcccaagaaacactcagtaaatactgatgctgggcactgtgaaatgagcccttcagagtaaactgaggttttgttacaaatgaacaagcatttagcctcccgtgatccacagcaattttatgacaattccatgggcattgttttagtaatctaatgttgtataacaaactacccccaaattcagtggcttacaacaacaatcgattatttcttgccattctgtaacatggattgggcttagtgatacagttcttcagcactttgtggtgtctgctggggctggaacctgtaagatggcttcttcactcacacgtctgccgcttcagctgtgatgttgggaacagctggtggctgggcaggcattcctgtccacatgccctcttcatgtggagagcatggtctcagagagttctgatgtgttacatgatggtggcttgcaggaaggaggaagcagaagcttccagtactcttaaggctagggcttgtccaagtacatcacttctgacatattgtagtgattaaagcaagtgatggggccagccccaattcaagggaggggagataggtagcggtagggatagatccccaccgttaaggggatgaatgagcagtgtgtgtgtgtacagggaaggaaagaactgatggtggccatttttagaggcctcatagatgtgtcctggactgcttggtggggactgaggagtactggaattggatttgttgcttgtaactggtttgtttcttgttttgagcacatgatctcagaggaatgaggaactctagacatttaaacagggattctcaaacaattttgtggtgatccatactggaagttttaggaaacaatgttgactcttaatctgtgcactgaattctgaagtcctttattctgtttcattttaaagaaagtttgtcttgactcttgacattgatttcattatctaccaatggcataacattgtgatttgaaaaattccagtctaatcctatctactcattttagagatgaggtggctaaggattaatgaggttgagtgactttttagaggcaggactagtatgcaggtcttctgactcagaggtgattaaatgccctatcagttcaccgtactgcatttataaatacagagtaagcagtggatctaacgtgagttattaattttgtttaatctatacttactcattatggtcttcacaaaagtacaaatgagggattgttgtttttttaaatgtatttttttctcattcccctacaacttcaccatgcttaatataatttttcaagcatgagcattaactcacagcatttctgagcaagtatataatgtataacctattctctgccctcagactgttttttttttctttttgaggtggggggtatagtttgcctacttcacaaccccaggggatataaaagaaataaaaatccataaatatcgtcctatttaatattattgtcaagaggaaaaatgttctgactttcctattatgaaaaattggagtagtattctaatgaagatggtggaaaggtccacaggagattttgaggagcaggactgtcttccaggaaaagttttagtgtagttctgcctggagtcatagatggactggaggacctacaaatccaaaagttactcactttggtttagtggtgttatggggcttcattaactgatggttccattagatttccaacaataaaactgctttttaggtaaactaaactatctctaaacttggagctgcaattgatagcgaagagttggatggatgttactttggttcttactgcagtttgatggtctagtatagcactattcaatagaaatataatgtgagccacacacatagcatttctaaacattctagaagcctcgttttaaaaagtagaaagaaataagtggaagtaatttttttaagtttatattttgaaataagtttagacattaaaaagttgcaaaaatagtatggtgttccagtatatctttcacccatcttcttttaatgtcagcattttgcataatcatggcaaagttaacaacactaagaaatcatcatagatccaatattcttaactaaattgcagactttatttggactagtgaaataattaactcaatagatccaaaatattatcatttcaacatgtgatcaacacaaaaaattattaagatactttacgttccttgtcttgtaccaaacatttaaaatctggtgtgtgttttactctcacagcacatctcagtttagccagccacgtttcaagccctcagtcaccacatgtggttggtggctactgtataggacagtacagtcctactgtcacaactcagagaagagccatcatgaacaatctacttattctgcatgtgaattatctgtagggaacttgaacatatgcaacgcttatgggagaggcaacatggcttgctgttaggagcactaacctgggagccaggcagagtggaattccagctctgcaacttatcactggttgtgtgaccttgacacgtaactcaaactttctgggcctccttttcttcatctgtcaaaaaaaaaaaaaaaggaaatagaaaataaagaagatagcaacaactcatggggtaatcagatggactgaatgagataacacgttaaatgtgaacacagcaacttacctggagtcggtacacatcaaatgttagcttctagtcgtcctctatgtcactgccaatagatcaaatatatgtgcactttctttgggttaagtgatatgaaaagaccaattagggctctggttaatactttagaaaggctcaacagatgtttattgagtacctactatttgccagacactgggctgagtgctagaagtataaagatgcataaaaagcacttaaggagtttactatttagtaaaagacaaatagcatttaaataagaattctgcattttctgtgtatatgtgcttgtgtttgtgtatctgtgatggggtggaggatggaaattgttgtggcaatttaattaatttttaaaattataaaacaaacatacctttaagagttatgaaaacagtttaaaaaattgaatattggccaggcgcggggggtcacgcctgtaatcccagcactttgggaagccaaggtgggcggatcacaaggtcaagagattgagatcatcctggccaaggtggtgaaaccccatctttactaaaaatacaaaaattagctgggcgtggtagcacatgcctgtagtcccagctacttgggaggctgaggcagaagaatcgcttgaaccctggaggcagaggttgcagtgaggcgagatcacaccactgcactccagcctggtgacagagcgagactctgtctcagtaaataaataaacaaataatatcagtaatcctgtcatcttcacaattagctttttctgtcttttaaaatatttattttagagttttttcatttgattaacattgtgtgattgtaatcatagtgtaggtacagtcacttaacttctatattgctagatatttgctgcagaatctgaaagactatttgtaaagagacagttacctaaggcatttttaaataaatgatttaagctgcattcattagtaggaataaaatttatttatttcttattacagaaggaggtggtgaactcatggaggtggttagatgtgtttaagaaagctatcagtggtaatgataatgatagagctaatttttcctgagcacaagtattgtgcaaacccagcagtatgactgcagagccctgtcttgtctaataacctgtactgtcttcaaaaaaatttgtgtgtttgttttaatctgagtgtaatatatattgagttcttaaagtctggatatatacagagatgtagaaattcacaataatgactctaccaaatgtgtaattgtctttgggaagttacactatggactatgtcctttcctccctccttccctccctccctccctctctccctccctccttccctccctccttccttccctccctcccttccttccttcctgctttcctgcctttcttccttccctccctcccttccttcctgccttcctgccttcctgcctttcttccttccctccctccctccctccttccttccttccttccttccttccttccttccttccttccttccttccttctctccctccctccctccctctggcctctgtagctcctcaccaggccaattccaagcctccctccctcccaccctcccttccttgcttccttccttccttccttccttccttccttccttccttccttccctccctccttatatagtctgcatttactttgtattatgtgatcaataattttaactaaattgtctttttatgttatagacgcaatttgagggatgaactatcttgcactttcaaaacgaaaactaaaatctcattgatgtatttttaaatattctattcattgtgtactggtcacaagacaaacagatctaggtttgaattctggctcttatgtttgctaaatatattctttttgggcagcttaccttctttgagactcagtttccttatttgtgaaataagaacaagaaaagtgcctttcttccggggtagttttgaggtttaaaaaagataatgtatgtaaagcttgcactattacaaaatatacttcacacacattgaccacagaaagtgttcaataaatggttgtataacagtcagttcaagataccacagttaactaaatgtgatctttgtatcacagcagtcattttgaaatccgggctttttttttccaagataaaactgctttgttttgcctccattctcttacttctcatttatcttttcaagaatcaaatatagaggacttaaagcaggatgtttcttttattacttaaacaggattgctcttctaactctatcagtgaggccatgaggcttgctgccctggcatggaaggagaccatgaggaaaaggaaatggaaagccagaagttggccccttccattccaggaggatgtggggaagaagcagacagagcaagagtaatgagatctttctgccccttggtttggtcggcatctcattggcacaagggaactttagaatcatccacataattttgggattctgagaatgtgagtgctagtgctgtggtacatggggggtggcgggctgcaggctcttataacaattccaatccttgctatagcccaaattggtttaggagtgatagtgctgtggctctgagggataagcttgagtgagcacccctggctctccttggcctgtggaaagcttggaggaattggcctggtgaggagctacagaggccagaggatcccaagatgggaatcaaggaaatgaatttaaatggttgggattatggactttagcaataaacaccagaatctcactttcagaaaaatgtgacatagaaacattatacctctacagcacaagctgaccacaccatttgtagcagagaacattgggtgaattcacagattctgcctccccagtgccagcattaggtcacattatctacattcttctacatgacaacattttgacaagtagcagggaaaggataagattgttcaaaatcctgaaaagacactgtttgatcagaagagactgagctatctaaagagaaaaagtcaactattggatctaagtttttcagattgggttaaaatttattttttcccctatcaactggaggtgtgagtgtatatgtttgcatgagttaaaaaggatgggaagttccttttaatgagatgggtaagattcttagagcccttttggtgacagggagatcaaagtttccattttgaacgtactaaatttgagatgcctgttagatatctaaatggagagaatgagtaggattttaggtatgtgagcctgatattcagaaaagaaggctgtggcgaagataaagatggagttacagcaaatagatggtgcttttgtgccaggtcatagctggcccttggcaacttaagtgtttgaagaacatatacttctcatctgtttcttttggaaaccactgcatgaatagctggggctgggaggatggaagcttaacttattctcccttcttcttcatcataatcctaaggaaaatggaaaagtggccatagactacactggcctggagggtgtgtaatgctgctgagcatgaaattcttagacatatgcagggttgcccgtatggaagggactaaggcaagcctgcccacactcccacgtacttcatgaaaggagtagtgaggacactatttgcacatcatccaggttgatatttttaaaggaaagtcccattcttttgtagcttcatggtttaatatgaacgcatgagaagggatgacattaaaggtcttttgcctctggttgaacactaacaaaagccacttaccttctactgtttttcccaatagcttatttatgatctaggcctgaatatccttccacctgtctattggggttttcaccatccttgtgtcatgttcacgctttatgatgtggcgacatttaaggcatgtaactctgatttccttccttccatttgtactatccatgtttacctctacttcacatatccatcttctctaagtgtgtgagtacgtgctctatttcatgtcactggagagggatgctatctttccaagtagatgcatttgaaccaatcttctcaccatcactgacataatatacaactccagctctgttgaggtgtcagcaggtccgttgtcatacttgacttgttttgagttgctgattctgtggaatctatcttcttcttgaaacaaatgaagtctccttttctgagtatctcaaacaaagtataagacaaaggctaataattaccatagtattaataacattaattataatattgatagctaacacttgttaaatattttcttacatactgggttactgggttcattttttcacatgtgctatcttagacacaggtgaggtaggatatgggaggccatgtacctagtggttaggacccaggatctgaagccaaactctgtgggttgggattttgacactgtcacttgtaagtgtgtcatctggaccccccccttttgccttgattttttaatataaaaaattggaataataatagtgaggaaaataagaatacctattgcacagagttgtttcatggactacatttggtaacacatccaaaaaaactcagaaaaacacttggcaaatagagatccatcaatatcagctttataagtatcagaatgacatgttctcctgtcaaaaatgagaaaaataaattaaatataagcgatcctaaactgtaccatgataggtggaatattcagacttaaagccaggtttgtttaaggtgatacatcatccagtaatctaggggccaagaggcccccctaagatacttctgatacttgtatataactaatgaacgtgcattctaatgtgaactggtggcaaacatgccacatgctgtatcacatgagtacctgttatatcacctacaagagaagaaaacagtacttccattttgctggactttcttaccagttcagataactctgatccatacgcaaactaaaaaaaacaaaaataaaaacagcagttgtgtggatatacctgactactaccacatcagttcttggcctatatatgtaaaagtattttctaaactttaaagctcttatgattattatcctgggatgcctattgcgtgggtaccaatacctaggaatatttgtgccatctggatagaaataaaaaggccctgaaggttgatgttataactctcaacgcatttttttccctctacttttcttgtttctaatgttgacaaccacccacatggtattcactggttctcagtgcagcccacagaaatgccagctggctgcatgccagtgtcagggggatgagattgttgagagcttcctcatagcaaaaccctgtcaatgacaagcattgtttctgaatctgaaatatttttctttttctgtccctttggtttctcttcccactggggaatgggactcagaatgggtaactaattatatcatggtagctgtgatgtctaacaacaccagttctcatatttatgcagcatcactcacttggctgtaccagctaatatgtgaagattgggtgaggctgtcagcatccacgtgcagcgttgccggcaagtctggtgtgcctctttgtagctccatgcttactttcaaaaatatgatttgttttctccaggcctgtccaatgcaccacatttggagagaaacacgataaaaacacaaaatctgccttctgcgtattttttggcaattaaacaatctttttcttaaatgaatagaaataccaaattttcctgtttgagaacaaatgatcaccaaaattcaatcgcaagcatttgtaaaccaaagatccttcttctatcctgataacaacttctcaagtagcatcacagattcactctaaggaatattctttatttggaatccggtcttgtgcacattggattgctgattagagcaataaatgaaggaagcttggagagctcacagcacttcctagactgtataaaaacacattaccttttactcaacaagcatagtgctttaaaaattgatcctcactgacttaaggactttttttggcttctgaaatctctcatgcaaaatctaagggattcagactgtatgtattatacacataatgaaaattggtgagccttcaacaagtgtatgatttgtgcataccatttcaataacttcatatgttactgtgcttatattagtccgccaggaatgagatcagttcaccaactcaaggtttctttagataatgacggagctaggattcataggcttatcattcaagatactcctgttttacactaggtattgtgatagttcagaatattgtattatctcttgtggtgaacaatctcctaccaaggctcctagagattgccaaattggatttcaagtaactctggatttgagtacaacaataagagaatgattgattgatgaccctcttctaccataaacgtgaggtttccttgtgtctgcaatttctgaccaagtgatgtccactaattatgtacaatgcagctacggtttggaatatttcagttgtccttctaggtctgtgaagattgtgcttttctttggtagaacaatagatgaattagtgtttactgagcactatgactaggcgtgttctaaggactttacatgtatttaatcatcacagctatcctatgaagtgacattactgttttcctaattttcagacaaggacactaaaacacaacaaggttaagtgattttcctagggtcacacagttggtaagtagtgggaggaaaacagacccaggcactcctattccaggcatagtgcttctaacctctgtgcccatagagtttgagagacagcttttttgtagaagtagcagtaagggaatttttcagtattaggtgaatccagtagagaagcaaggactctctgatttctaatgcacaaacttcctggcttgttaggtttctttgcctgattagtaacagcttgcaggattccttaatttggggaaaatcctaagcctactgtagctacacaatttctccttagcaacaaaaatattctgaatgggtaacatactgagagcacatgaaggaattgcaaattgtaaatggtataagcataaagatttcctcaacacatggctgtggtggtgataggataggcatttccaagatgggtaccatccacagttctaagctctccctaagaaagaaatagggttccacccaaaaggaatgtagtgctcccaatggttaaagtatctggtcatgtatctagaataaggagcactactgtgccttcctatcagaggaagtgtgagcatcacattttcaagttacatacaaggttataagacattttctttaaatgcactacatggtgcatttgattaaggactgaactttcaaaggattcctttgagtagagtgttttgatttgctcctatcaggcctagccctgcctcataaataatggaacaagccttgcatgcccctgaattctgagctgtggcaagcatttgaggaaatactgagtcactgagattctcaagagccttaaagaaatgaggaccagttgaaattctacccttggggacctttgcacagactttactttggtctgtggctaggacacaagagggaggtgagccattggttcatttgttttcaacccataccatattattccatataacacaagccatcgcactctggtgtaatatcaactgcattctcttcttggtcttaaccagaccatgagtcctttagtgtcacctcctgttgctccatacaaaatcattagcagcacttgtgcatgatttggttgattctcttgcctgtttggctgcacttagaatcctagagcagttctacaaatgaaaaggtgtccaagtaaaggctctacatgttaggataattcagtaactaacggttgcactgttaatttgattttgctgctgatcagagataggaagagaattgtaactgaaatgcattgcaaccgatttgtaaatgttggtacacattatccatcattgttatgctattatgctattaacataaattatcacatagaggtaatttgaaattgtgaactgacacaggtatatctcatttctggcaataattacacataaaggaaggaggtcaggctaaatgttgcatagtattattgtgtgaactactgatggacagtagtgattaagtgatgttagcattgaaaaattaatttgttcatagcatttctattttttgtcatatataaattttatgtatcacattcaaatgagtaatagttttttttaagaatacacttttagggctaacttctttttccttttctttttcttttttttgttttgagatggagtcttgctctgtcacctaggctggagtgcaatggcgtgtcctcagctcactgcaacctccacctcccgggtttaagccattctcctgcctcagcctcctgagtagctgggattgcaggagtgcgccaccaggcccggctcctttttttgtattttcagtagagacccagtttcaccatgttggccaggctggtctcgaactcctgacctcgtgatccacccaccttggcctcccaaagggctgggattacaggcgtgagccaccacacccagccaggaataacttttctaaagtcacttctgcttcacactgatattgattttactgagtttttgtttcacattttatttttagctttatacatagtgataggacattttctttaaaaagttagaggatacaagaagacactgttaaaaagagaagctctttaacagtgacttcttggttgactacacgaatctccaattcatttgtgtattgatgaagtgccttccctattcttaaagcaagttaggacaaaaacagtaagaatatgcttcaggagacgagtattcattttgactaaaggaactgtgtatgcaggcagattccatgttgactctatactgtggagaaatactttccatttttcagtgtagtctatcagattacatactacatttggtctttgggatggactaatgaaaagaaaactaagatcgattttatgatgggagacaaagtcagacaagaaacattggattcctcagatttaagctttgaaaatcttacatgctccaagcctctcaggcagaggttaagttgtcaatggataccacagtgaaaatagtggacaagtgtcactctgagatcttgccacaaccagatgtcaagaaaaaaatgtaaaatgacaaatggacccttaacagaataatgtgctatcattgcatcctctcccaaagggtcccatcaattctagcacttttgagtctatgcaagtcatacgatacaactatttatgagatggagatgacacaacaacacctgtgacattctggagctctgaaatgggaggcctaaatgggttccttcaggctcaagtctgaaagaagctgcacataaacttatagagacagtgccataacaattcttggttattcttaaatgtggcatgctaaatgcagagtcaggacacaggagttttttttctaagtgataagttctactataatcatgaaggataaaagacatatgccatcaaaattacccttgaaaatctcaagaagatgccatattgaagactgagacaatctctcagtgaatgctacactgccagctttattcccaggtttgataaatcagtagatatttctgtgcaccagatgtagtaggtgcctttcatttagggccataatgtatgagaaatacatatttttaagcattagaatctgagtcaacatagcacagatacttgcatgatgaggggcacgtgagaactggggctgactcgaggagcaaattttcatattctcacactccgtcttcaattctttctgggacatacatgcattgagtgaaatggccaaaactgcggtctgtattgctttcctaaaatttttccctttcactctcttcctctctttgcactgcctcttgttgttctcttcctctcccagacccttccttccttccctcccctcccctatgaactatcagcagttagcattatttgtatttccccaactaactctttgagatggggtagaaacattaagccttaaaaaaccccaaaaacctatatatgttctattctcagctctaaggtttctagtttcaatttctagtttaaaacctatacgtcttattttctgttagcaggggttcttaactttttataggccaggatttttgagtagttgatgaaaacaaagggccattccccagaaaaatatgctgtttgcattcaaattcaaatttttaaaaatcaaggtgaactcatggtcctataatctttaactaagattctctagagtttctctttcaccacaagtttctctttgtaatagcaagtgtcccatgttcttgcaatctaatattctatgttttagagggagactataatgataataatgacgattatactaggaataaataggtaacattcattaagagcttaaatctgtataggcattaggccaagttaactcatttaccctttaccaaaacccagtgatgaatgtgttgttgtccttatttactgttaagaaaactgaggtatagggaagctaaggaatttgctcaagatcacaaaattagtgagcagctgagttatgatttgaacccatttgcttggtaaaaaagagaagagaagatgagcatggccatattgtaccatcagattgtgactctctaacactggtcctttctaatcaggagagcgtccctccttaaaggagaggatgtgccttctcttagtagttgatgtttgctgttgacctaaactacatctatccagtcttacaatcagtcctcctggtaagcacttgagtcatttcagcagttttatagcctgattttggattcttaaaaatattataccggctgaggcaggagaatggcgtgaacgcgggtggcggagcttgcactgagccgagatcacgccactgcactccagcctgggcgacagagcgagactccatctcaaaaaaaaaaaaaaaaaaaattatacctactttccagaacaacttaatttcatattatcatttcagagaatgtttaatttaaaaagatattattgaggcttcaagcatgtaatgacttttcatacatatcagaaatctaacctgcagtaacttaaggaagaaaacaaacttattgaattgtggtgtccaaagaactactgaacagcgaagttgtggaaggagcagggaggccatgaggcctcaggaacaactcacacagggaagcaaataccgataggtcccgctggttctaatctgcttttatttgcgttcattttcttttacttccaactcactttcttcaaatggcaggaaacataaatgaccatagcttataagttttatattttacatcttatcacaagagggtgacagttttgtcattgtcgtgatgtcaatccaaggcaatttattttattgacctaacttgggttaatttcccacccctagaataaatcaaatgtgacttgagatggagaaataggatcatttgtgaaaacatgtcagtctcatagaaatatgtgaatggaatagaaatggagaagttcccaggagaagggaccgggtgatgaatagacaatgctggtttgctgaaaagtaaaactcaactaaatttatttgtttgaagttagcattaagttatagaggtaactattagggggcttgaaaacatatttcttgatttataccattcgatgaatatactgggaaaatggtatgcacattgaatttcattaatttaataaataggtaattatatggaaaaattttatcatgtctttcagcaaaagtaacattattgtgaagtaaataatattatccttaatttggatttttagatgagtacatttaaagcgagataaacttgcaatgaggagccaatgggaataagaagcacctatcttagaagaatagctaggaccttctactgaatgacttctggaagaatccaggactatgattaaggtagctttaagcagagaatgaaagtgtacatgcaaagttcagtgactaaattgtcaaagttttttgatgctgtacctgtcacctggtgctttttaatgaaaggagaaaaatagaattagtatgcacaggacattgtgtaacacaattctaagatgtagacctgggttagccctttgaagaatctgaaatttgcaactgggaaatatcgctggtctagctacagctgccttacattgctatagctatgctgagtaaaagatggttctggataagagtctatttaggaattatgtcattggaaaaggcttgcattttgtggaggtcacattttcagcattgaactagagccaagacgggaagaagaaatttctttctcattcttttttatttgcattaagtaagaaaaatacatttacatttgggacttcacatatttgaaaatatatggaagtcaggttgaagattttcttcttggccagcatcagtgagtgtgagaaatagtggtgtgctgtggatggatacatgcagcaatgagccccatcatttggaaaaatgaacatcaacaatttcagctcaaatacattttttaaaggtgctttatatgtagatttatatttgatattaacaaatctcttttgtttagcatgaactctgggaacatgatgataataatactagggctaatttgtagtaatgttttttgcacctgggaataaatgtgcttttgtacagaaagttcaaaaaacaatttaatgttgaataaatataatctctaatttatggtgatagtaggctgtcctagcagcttgaaaggacaagctggtatatatggggaaaacaaggagccaaagggtgacacagggtgggacaaacgcaagaaaggtgcaaaattgacaagaaatgaagtgtgcttacacagactgtaattgatctaaatatatgccctagccgacagacaccctcctgaagttgccaccttgaaaaaaagtaccttggttagttttatccttgtcccactttccttccaagtcctttgggaagaactttcaggctccctttcctctgttttctagacactaggacaggggcaggaaatctagaagcaatgactcatgtgttatttggaactgatttgaacctagagtctgaccctttgcatcttttggaaatatttcaagaaatacatagccaactccaagaaaaacacatttttaccaaatcgctcagtaataggacagaaaacaactttaggaaaaacttaagtacagttctaatttttattatgtcaagaacatatgagatgaggtggagcctccagactgtctttataatggagataaaaattctccaaaatataccttttcacctcctgcaaataatgacttagggttcagctagaaacttatgtccaaactaaaggttttccacccgttgtggaataatttatttcttttggaaaacttgcaaaccatctctccataagcaaaagagtgaaacaatagtagacagaagggaatagaaaaacaaggaacactttgtcttcaaaataacaaatggttattagagtattggcaaagggataagaagatgcaaaggacagggtgtgtgaagagaaagaagagaaccacagaagggccagactgccagctgtctaccctctacaaacccattagggcagggagagattgggaggggactctcttctccatcctagctgaaagactcccgagaaaaaggcaggtctattagtcttctagggctcccataacaaaatatcatattaggtagcttaaacaccagaaatcattttctcacagttctggaggctagaagtccaaaaccaatgtgttagcagggttggtttgattctgaggcctctctccttggctcacagatggccaccttctcactgagtcctcacgtggtctttcttctgttggccgacatacctggtatctctccgtgtgtccaaatttctcttcttataaggacgcaagtcagattggattagggtctagcccgatggcctcattttaacttaatcctctctttaaggtccccatctccaaatgtggccacactctgaagtactggggattaaagcttcaatttagtgtgggttaggggacacatttctgcccataacagcaagatagctcatcagcctgtcagcctcacaaataggcatcgttacagagatgagcagaaatttttttgttgttgtttaactggagcaatatttctgtaaggcaaggtaacgcaaagtgttgtcatcatttactttcagttatcaagactctggagacataaagtagacagtgagtaaactggctctttgacccaggtgtggcctgacttttgtaacagctcttttcacaggagactgaagtatttagggacaaaatattatctgtttgcctgaggatggatttccaaaaaggctaccaatcctgctacaaaggctttgctaccatatacctctcattgctgtgtttactcaccatggtggagcatttccaatcctgtcaacttgtctttgattttacattttttatcgtaactttctagccaaatatcaatgctgctatcttttatatgttcaaaataaaaaattgcacagtggttatgtttttattttatttaaagattatttctgtttttggcaatctttcgcagctcttttcagctctggtgctacaataaacctattgaaactctgacttttatgaagaacaaaacaagccagagaattatttcaccccacaaagttgggagacagattttatttgcaccctttagtgttcataaatcctatatatctccattatacgtttaccttaagaatggaattttgtgtcttgcttacattttataaattttgtctggagtatttcacataaggaagtactttcatatcttttatttaaaaccaagacatcttctgggctaaagaggtgacttttagaaatggagttaggacatgatagtctgccccaaatgagagacaaatctaaagtatgctgagctaagaagcaagacaggtttcaaaaacctcttaccatatttatttttatatgtacattttatcctgtgttcattcccatatgatctgccatcaattacccaacagtaatgaaaacttctatgtttttacaaggtagagacacaataaaactaactggaggttggcaaggctgccacttcagcttcttttcatattacctgtccctgcatacccctgactcctttcctgtgcccttctttcaagcttatatatatatatatatatatatatatgtatgtattttttttccttttcatctcttaaagctttttccctcatttattttattgggaaaagcatagtgttgtatatcaaagcaccttggactcagactaaccagaaattgaaatcccatctctatacttgctgcatacacttggaaaagttactcaccatttctctgcctttgtctcctcatttctaaattggtgcaaatatgaaaaataaatgagactgtacttataaagcactgagtctagtgctacatagtataggtagtttggctgcatagtgtgaatgaaagctattttaatctttcttattccctctccttattatcctctttaagtctcttccttcctttccttcccttcccctatctcctactcttctttattttctttttggttcattattgtctccagtcttttctttcttcctctaacaatgacagtatacacttacatatagagagatatatatgtaatcagattatcatgtcctaactccatttctaaaagtcacctatttggcccagaagatgtcctgactttaaataaaatatatgaaattatttccttattttatgtgaaatactccagaaaaatttataaaatgcaagcaagacataaaattccatatatatatgtaatttcctgtgacctgatccagtgagtatcaaataagagactatattgggaatccttatggatttttaattatttcaagagcctgagggaagccttaaattgatctgcaatagtacttcattgtttcttttcttttggctccaattaggtcaactcagtatagagaaactggttcatgctgatcagaatctctgatgaggagttataaatgtctttggttttaaaaaagagagaaggtgggggaaatgatcaacttatactttttctgggagtaccatctttcaacatgtaacgttcgtgagtactggagaagaaaatgaacaaattaaaatccttatagttctcttttcttttgtctaaaattaaataggtggactagatccttttaccttttctgaataatagtggtaggaccatgtcagagtgattctttaattgaaacatgctttggtgtttcaggccctcaggcctttcattacggtatgactataagaaaaggttgataaatcctatcattgtattagttatttaggaatattattgaggaccttttttaaccacattattcaatgtggctctggtgtgaaacccatttcactatttcacattggaatccagaaagctcagagtcaaattcaaatcttaatcacaggcattgaagaggtctttttaggctacctgtactctaatatctctggtcctggagtttaaaaaacaattcattgattttcagtttctggtttcatacatacagagcttagagttgccactctatcctaaaaacaagtaaaaaattgaacagattgaaaaatcaactttccttaggtccatcagagagctgaggatgcaaccaaactgctcaacccaagactaaagagacaggcaaatgcagggagtcatggcttgtcagaaaagagactcgggagaggaaacagacatgggaacaacagctagagtaagaaaacttgaactgtaatttgtgaattgctagaggcttagtgtggacaaatttgagtcaaaaactccagggggcctcccacatttttgtcagttttatctccaggagtttaaccaggttttcacagtaaatatcagagaaaatgtccttatgcttctcgaagggaaggggaaaagaagccattttgaaatatgccagagcactccattcttcttaataaggcccacatgggaaactagttaaccagagccccacctgctgggctattatcagagcctaattgacctgggggaaggcacgtactcaactccagtcagctttaacttttcacatgagaaaggaaaatacccaaatttagcccactttagccatcctgtcccacctaagggagatgggaaatgaagaatcactagtgaagtgcctagaccagagtcacaggctcataaaagactgagacctgattataaaactatagaatgcttccccttgcccacaccttatcaccacattactaaagacctatttacaacagtttcttttgcctggttcatcatgcttagctaccaagaaaaaactacaagagaaaggaaataaagtttagcaccacaagaaaatcaccaaaccacaggtgtaaataataacagaggatctaaagacagatcctctaaaaaccagaaaatgattgacaaaattataatctcaataataacctttattgcaaatgaatcaagttcttcaattaaaagttaaacagtggctgaatggattttttaagaagacccaactatatggtgcctccaagggaatcatctcactattaaagacaaacatagactgaaagtgaagagatggaaaaagatattgcatgcaaatggaaatcagaagtgaacaggagtattcatacttagataaaatagactctcagttaaaaactataaaaagagacaagactattatataatgataaaaggctcaactcaacaagaggatataacaattatatatgcacaaatactggagcacccagatacataaagcaaatattattagatctaaaaggaagaatagagtgaaataccataatattaggaaacttcaacaccccactttcaacaacggacagatcatttaatcagaaaatcaacaaagagacatcagacataaacttcaaaacagacaaaatagacttaacagacatttacagaacattctatccaaaagcttcagaatacacagtcttctcaattgtatatggaacattctccaggatagatcaccacagaagtaaacaaaatagagacaaaaaataattcacaaaaatggaaaaaacaatcctaaaattcaagtggaaccacaaaaatactgaatagccaaagcaaacctgagcaaaaagcaaaaagcttgagacatcctacaacctgagttcaaaatatgctatgaagatatagtagctaaaacaacatggtcctggcataaaaacaaacatgtaactcaatggaatagaataaagggcccgtaaataaatgcatgtacctacagccaactgattttcaacaaaggtgccaagaacacaaattgagggaaagacagtccctaaaacaaatggtgctgagaaagttaaatatccacgtgcagaagaatgagactagacctctacctcttgccaaatgcaaacatcaactcaaaatggattgaagacttaaatgtaaaacccccaattattaaactaccagaagaaaacatagggaaacactttatgacttggattgggcagggattttttgaataagatctaaagagcaccggcaacaaacataaaaatagacaaatgggattaaatcaaactgaaacacttttgcacagcaaaggaaaccatacagtgatgatgcagcctacagaatgggagaaaatacttgcaaactacatacctgacaaggggttaatacccagacttccaaagtatttaggagacttaactgtagaaaaataaacaactaaatttaaaaaatggctaaaataccccaatagatatttatcaaaagaagacattcaaatggccaacaggtacatggaaaaatgcttgtcatcactaatcatcaggaaaatgcaaatccaaaccataatgacatactacttcacttcggtgagaatggctataatcaaaatgacaacagaaacaagtgttggtgaggatgtggagacaagggaacacaaacacattgttggtggaattgtaaattagtacagccactatggaaaactgcatggagattcctcaaaaaattaaaaacagaaataccatatgatccagccatcccactactgggtatatattcaaaggaaaagaaattactatgtcaaagaggtatctgcactctcatgtttattgcagcactattaacaatatccaagatatggaatcattacaagtgcccaacaatccaaaaatggatgaatagataaagaaaatatggtgtatatatacacaatggaaatactattcggtcatgatgtgattaaaattctgttatttgcaacaacatggatgaacccagaggataacatgttaattaaaataatccagatgtagaaagacaaatactgcatggtcttactcatttgtggaatgtaaaacaaaacaaaaaaacccaaaacttgatatcatagagagcagaacagtggttgccagagaaatgataaatacatggggttaatagatatgctaatgctcatgctaatacatgagctttctggatctatgggtaggtgtctgacattaatttgttaaaatcctcagttatttttttcaatgaatgtcagacacctacccatagatccaagaagctcaaagaatgccaaaaggataaataccagaaaatccatacctaggcatatatctttcaaactatagaacatcaaagataagggaaaatactgcaaaaagccagaggaaaaaagatattacctttagaggagtaaaaacagaaattacatctgactctcttcaaaatcatccaaggaagaagatagtagagcaaactattttaaataatctcaacagcctagaattctgtgtcctgcaaaattatctttcaaaagtgaagggaaattaagactttctcagacaaacaaaaactgaagaaagtttttacctagtagacctgccttgaaggaaatgttaaaacaagttctttagagagaaggaaaaataaaataggtcagaaataggtctacataaagaaaggaatcatatcaaagaaggaataagtgagagtaaaatgaaaacttttatttttcttattctcaattgatcttacagatgactgttctaaatgataatagcaacaatgtatttgaatatgtgtgtttccatattactcacatatcttgagtgtgtatatattaatataatatacacacatatatatgtgctcacatagaagtgaaataaatgacagcaatgatgcaagggatcagagggaggaattaggattattttattgttataaagtattcgcactaccctacctgtgaattggtatgttatttgaaggtagatttaaattagttgtaaatgtatagtagaaggtttagggcaaccaccataaaaagtaaaataagaagaagagagctgaaggagaagaggaggaggaggaagaggaggacaaggaagatgaagaagaaaaagaggaagaggaactaatatgcaagaaaaatagaaaatggaaaaaatgctcaaatcacaaaaggcagaaaaagagtggaagataaaactaggaacaaagaataagatcaagaaatagaacatagtaatatgatagatattaatcaagctatatcaataataatttagagtggcaatgatctaaatgcagcaattaaaagacaaggattgtcagagtggattctaaaacaagacccagctgtatgttgtctgtaagaaacacactttcaatataaactcgcatactaattaaaagtaaatgtgtgaagaaaaatataccatgcaaacatgaataaaaataaaataagagaagacacattaatttcagacaaagcggctctcaaagcaaaagaagttattggggataaagaagggcattacatgatgaaaaattggtcaactgtctaagaaacgtaataattcttagtgtgtatgcacctaacaacagagtatcaaactagataaagcaaaaatcgatagaagtgcaaggagaaatagatgaatccattatcatagttggataactcaacacccctttatcagaaatggacaaatctagtaagcagaaaataagtaaaaacgaagtttaattcaataacaccatcaatcaactggatataatttgatttccatagactatttatttcaacaattgtagaatacatattcttctcaagctcacatggaaaattcaccaaggtagaacatattctgggccatgaaatccacctgaacaaatttaaaagcataaaaattaatgtctgcttctgatgacaatagaattaaataataatcaatagcaaaagtataactaaaaaattccaaaatatgtggaggttaagcaatatgcttctaaataacacatgagtcaaagaagaaatctcaagagaaaaaatattctgaattaaataaaaataaaatcacaatttatcaaaatttgggattcagtgaaagtgcttagagggaaatgtatagtcttgtgtgcatatattagaaaagaaaaaaagatctaaaatcaataacctaagcttccaccttaagaatctaggaaaaaaggagcatattatgttcaatttaagcagaagaaagaaaggaagaataagaattgaagaagaaatcaatgaaattgaaaatgggaaatcaatagagaaaatcaacaaaaccgaaacctgacacttttaaaaagtccataaaatttataagcccctagccaagcaaactaagaaaaaaagaaggatacacattagtaatattggaaatgaaagagtagatatcacaacgggtcctatgaccattaaatggatgataaagaaatactaagagcaactctatgcctacaaatgtgacaatttagatccaatagaccaatttctcaaaagatacaatctgccaaaactcacactcacacacaaatgaacaatcttaatagactatagctattaaagaaattgagtcaacaattcatatgcttccaaaacaggaagtactaggcccacatggctccactggtgaattctaccaaacattcaatgaaaaaacgtgtcaattactacaacctttttcagagaagagtgttttttcctaattcattctatgaagccagcattaccccaataccaaaattaggcaaagacattccaaaaaaacaaaactacagaaagaggcaggtcaagatggtaaaatataaggttacaccaattgtctcctctgcaagcacaccaatttaacaactttccacacacaaaaataaacaccttcataagaaccaaaaaaatcaggtgagcactcacagtacctgattttaacttcatatcactgaaagagacactgaagaggttggaaaaacagtgttgaattaccagtgccacccctccccacatcccctggcagtggcaacgtggtgcagagagcatttctgtgaagcaggagagggagtgcgcagcaactgagaagcactgaactcagtgctgccccattatagcagaaagcaaaaccagaacaactcagctgatgctcactcacagagggagaatttaaaccagccgtagccagaggggaatcactgatcccagcagtcatttttttctttttttttgaggtggagtctcgctctgtagcctaggctggtgtgcagtggcgtgatctcagctcactgcatctatgccttccaggttcaagctattctcctgcgtcagcctcctgagtagctgggattactctccaccacgcccggctaattttttgtatttttagcagagatggggtttctccatgttgggcaggctggtctcgaactcctgacctcaggtgatctgccctccttggcctcccaaagtgctgggattacaggcatgagccaccgcgtctagccgatcccagcagtcttaacttgagttcccacaaaccttgtcaccttgggctaaagggacctgggcccctaaataaacttgaaaggcagtctaggcaacaaggactgcaactcctatgtgaaccctagtgctgaactgggcccagaaccagtgaacttggggggacacatgacctactgagataccagctggggcagctaagggagtgcaggtatcaccccttcccaaaccccaggctgcatagcttgtgcctccaaaagagacctcttccttctgcttgaggagaggagaggggagaactttgttttgcatcttggataccagctcagccacagtaagatagggcactggtcagagtcatgaggcccccattccagactccagctaccagatgacatttctagacatgccctaggccagaaagaaacacactgtcttgaagagaaggactctgtcatggcaagattcatcacccgctaactgaagagcctttgggccctgaataactagcagtaatactaacagactgcactgagggccttgaatgagacactgagacttgctggcttcaagtgagattcagcatgttcccagctgtgatggctatggggcaacattccttctgcttcagaaaaggagagggaaaagtaaaggagactttgtcttgcaccttagatactagctcagccactgggggggtagagcatcaagcaggcccttgaggtccccgattccagaacttggctcttggatggcatttctggacctgctctgggccagagtggagcccactcccactgggattccctgaagggtgaatcccaggccaggcagcaatgaccggaagctgacttagctcttggaccttaagggaagatcagcggtagcctggcagtgctcccctgtgttctggtggtggcagtggccatggggtgaggctcctctgcctttggaaaggggaaggaatagtaggaagaactatgtcttgtgatttgagtgccagatcagccacagtacaatagaactccaggtcgacttctaaggttttttactttagttcttagctcctggatggcacctctgaacccgcctgggcactgagggaactgatgccagggaaaaggcacagacatggctgggtttgccacctgctaattgtagagccccaggccttgagggaatgtaggtggtagccagggagtggttacagtaggccttgggtgaaacccagtgctgttctggcttcaggtctgatccagcacagtcctagtggtggtggccctagaagtactggtgtcactttatccccagctccagatggctcaaaacagagagagagagattttggttcttaaggagaaaatgaagagagcaaagtctctgcctagtaatccagagaattcatccataccttgtccaagaccaccaagttgggacctctattagtctacaagaaccacagtgttactggccttgggacaccccctaaagcagatacagtttagatcacaacacctaagtccttttgaatatctggaaagccttcccaggaaggctaggtacaaacaagcacagactatgaagaccagacagacacagacaaacatctgcaagtatcaagaccatccaggaaaaaaacgacctcacaaaatgaactaaataaggcaccaaggaccaattttggagaaagagaaataggtgtcctttcagacagagaattcaaaatagctgttttgaggaaactcaaagaaatccaagataacacagagaaggaattcagaattccatcagataaatttaacaaagactgaaataattaaaaaggattacacagaaattctagagctgaaaaacacaactggcataacgaataatgcatcagagtgttttaatggcagaactgatcaagcagaagagaaaattagtgagcttgaagacatgctatttgaacatacacactcacaggagacaaaagaaaaaaagaaaaaaacaatgaagcatgcctacatgatctagaaaatagcatcaaaagggaaaaatctaagagttattagccttaaaggagaggtagagaaacagatatcagtagaaagtttacttgaagggataataactgagaacttctaaaacctagagaaagatattaatatcaaagtataagaaaaatatagaagaccaagcagatttaactcaaagaagactacctcaaagggttcaactcaacaagaacagctcactgtcctaaatatttatgcacccaatacaggagcacccagattcataaagcaaattcttagagacctacaaagagacttagactcccacacaataagagtgggaggctttaacacccctctgacaatattagacagatcatcgagacaaaaaattaacaaagatattcaggacctgagctcagctctggatcaaggggacctaatagatatctacagaactctccaccctaaaacgacggaatatacattcttctcattgccacacaacactttctctaaaattgatcacatcataggaagtaaaacactgctcagcaaatgcaaaagagctgaaatcataacaaacagtctctcagaccacagcgcaatcaaattagaactcaggattaagaaatccactcaaaaccacacaactacatggaaattgaacaatttgctcctgaatgactcttgggtaaatcatgaaattaaggcagaaatcacgaagttctttgaaactgaagaaaacaaagacaacataccaggatttctgggatgcagctaaagcagtgtttagagggaaatttctaacacaaaatgcccacatgaaaaatctagaaatgtctcaagttaacaacctaacatctcaaataaaagaactagagaaccaagagcaaacaaaccccaaagctagtagaagacaagaaataatgaagatcagagccaaactgaaggagataaagacatgaaaaactcttaaaaaaatcaacaaatccaggagctagtgttttgaagaaattaataaaatagacaactagctaagctaataaagaaagagagaaaaatcaaataaacaaaacacaatcagaaatgataacagagatatcaccactgaccctacagagatacaaacaaacatcaaagaatattataaacacctctctgcacataaactagaaaatctaaaagaaatgaacagtgttctggacaaatacaccctcccaagactgaaccaggaagaaattgaatccctgaatagaccaaaaatgtgctctgaaattgaggcaataatggcctaccaaccaaaaaaaaacctcagacccagacaaattcacagctgaattctaccaaaggtagaattcaaagagaaggtggtaccatttccactgaaactattccaaaaaattgaaagggaaaggaatagaaggaactttttggaacacatcaaaaaaattgaagaggagggactcttccctaattcattgtatgaggccagcatcatcctgataccaaaacctgacggaaatacaacaaaaaagaaaaacttcaggccaatatccctgatgaacataatgcaaaaatccttaagaaaatactggcaaactgaatccagcagcacatcaaaaagcttatccaccatgatcaagttggattgatccccgggatgcaagtttggtttgacacacaaaaatcaataaatgtgtttcatctcaaaaacagaaatatagacaacaaccacatgattatctcaatagatgcagaaaaggcctttgataaaattcaatatccctttatgttaaaaactctcaataaactgggtattgggggaacatatctcaaaataataagagccatatatgaaaacccacagcgaatatcatactgaataggcaaaagctggcagcattcctcttgaaaactggcacaagacaaggatgccctctctcaccactcctattcaacatagtattggaagtcctgcccagggcaatcaggcaagaggaggaagtaaagtgtattcgaatagaaagagaagtcaaattatatttgtttgcagattacatgatcctatatctagaaaactccatagtctcagccccaaagtatcttaagctgctaaacaacttcagcaaagtctcaggatataaaatcaatgtgtaaaaatcgctagcattcctatacaccaccaacaagcaagcagagagccaaatcataaatgaactcccattcacaattgctacaaaaagaataaaatacctaggaatacatctaacaaggaaagtgaaggacctcttcaaggggagctacaaaccactactcagagaaatcagagagtatacaacaaatggagaaacattccatgctcatggacaggaggaatcaatattatgaaaatagccatactgcccaaagcaatttatagattcaatgatgttcccattaagttaccactgacattcttcacagaattagaaacaactattttaaaattcatatggaacttaagaaaagccagaatagacaagtcaatcctaagcaaaaagaacaaagctggaggcatcatgctatctgacttcaaactatactacaaggctacagtaaacaaaacagcatggtacaggtacaaaaatggacacatagaccaatggaatagaatagaaaactgaaaaataatgccatatacctacagccatctgatcttctgcaaacctgacaaaaacaaacaatggggaaagggtttcctacttaataaatggtgctaggagaactggctagccataggcagaaaattgaaattgatttcatttttatatagggttggaggtctagtttcattctcctgcatatggacacccagctttcactgcaccatttattgaagagactctcttttccctagtatttgttctcggcagttttgtcaaaaattagttggctgtaaatatgtggattaatttctgggttctctcttctgttccattagtctttgcatctgtttttatgccagtaccatgctgtttaggttattatagctttctagtatattttgaggtctggtagtatgatgcctcaagctttgttctttttgctcaggattgatttggctcttcagggtcttttgtggttccatttgagttttaagattttttttctattactgtgaagaatgtcattcatactttgataaggattgcatcaaatctgtagattgctttggatagtattgtcattttaacaatattagtttttctgatccattagcatgggatgtctttacatttcttttcttcaatttctttcatcagtattttgtagttttccttgtagaggtctttcacttcttttttttattattattatactttaagttttagggtacatgtgcacaatgtgcaggtttgttacatatgtatacatgtgccatgttggtgtgctgcacccattaactcgtcatttacattaggtatatctcctggatctttcacctctttagttaaatttgttcctaagtattttattttattttattttttgtagctattgtaaataagattgccttttaaatttctttttcagctagtttattgttagtgaataaaaatactactgatttttatatattaattttgtatcctgcaactttactgaatatcagttctaagaggttttctgctagagtcttttggttttgctatatataagattatgtcatctgcaaacagacaatttgactttctcctttccagtttgtatactagaagaaaacatagggaaacacttcaggacactggtctaggaaaatattttatgaatacgacctcaaaagcacaggctgaaataaacaaatgggattatgtcaaactaacaaccttccacacagcaaagaaaacgatcattaacggagtgaaaagacagcctactgaatgggagaaaaatatttgcaagctactcattcaacaggggattaatattcagaatatgcaaggaactcaaacatcttttttttccttgatggagtcttgctctgtcacccaggctggagtggagcagtgtcaccatcttagctcactgcaacctctgctttctgggttcaaatgattctcgtgcctcagcctcccagatagctgggattacaagcatgcaccacctggcccggctaattttatatttttagtagagatggggtttcaccaagttggccaggctggtcttgaactcttgacctcaggtgatccgcctgcttcatcctcccaaagtgctgggattacaggtgtgagccactgcacctggccatggaactcaaacatctcaacaacaaaaaaacaaacaatctgattttaaaataggcaaatgatctgaacagatgtttctcaaaacaagacatacaaatgatcaaaatacatgaaaaaatcctcaacatcattgatgtttcagggaaatgcaaatcaaaaccataatgagatgttatcttaccccacgcaggatggctattatcaaaaagacaaaaaaaaattgctgctgaggatgcagagtaaaggaaactcttatacactgttgatggaaatgtaaactagtatagtcactatggtgaacagtatggaagtgcctcaaagaactacaaatattactatcacaggatccaacaatcccactactggccatttatctaaaggaaaggaaagcaagtatccaagaaatacctgtgcccacaacttcattgcagcactactcacaatatccaaataaggaatcaatccaggtgtccaacaacagacaagtggataacaaaaatgtgatacatatacacaatggaatactattcaagtgtaaaaaagaatgaaatcctcttattcatggcaacatgggtggaactggaggatattatgttaggtgaaataagccaggaatagaaagtaacactgcatattctcactgatttgtggaaatgaaaaaatattgatctcaaagaaataaaaagcagaacaggggatactaaaggctgggaagagcaagaagaagggagagatagagagagattagttaaaggatataaaattgcagctagataggaggaataagttctagtgttctataacactgcaggatgatgataacatattatatagactcaaatagctaggaagagaatattgaatgttcctaacacaaataaatgataaatgtttgagatggaagatataattactctgatcttttcgttatatattatatgtgttgaaacatcactacataccccctgaatatatacaattgttatttttcaattaaaaataaaaataaaaaagacgtgcaaaaaataaataaaaaaagaatagccaaaatccagaacaacaccaaaagcaggtaaatatatggaacaagatatggaacaacatgaactttcattcattgcttataagaatgcaacattatatagacatttggaagacactttggcattgttttacaaaactaatcctaccatacaatgcaacaataatactcctttgtattttacccaaaggaattgaaagcttatgttttcaatcctttacacaaaaacctgcacacaacgtttttagcagccttattcataattgccaaaacttggaatcaaaagatgtccttcaataggtcaacagatagataaactgtggttcatccagacaatggaatattattgagcacaaaaaagaagtgaacgatcaaacattgaaatgatatggaggaaacttaaaagcacgttattcagtgaaagaagccaatctggaaaagctacatacagcatgattctaactatatacgacattctggaaaaggcaacactatggagacagtaataatgtcagtggtttctaggagtgagggtagagcaagggatgaatagatggagcacagagaattattaaggcagtaatctttatggtactataatgaaggatatatatcattatacatttgcccaaactcatggaatgtccaataccaagagtgaaccctagtgtaaactatggaccttgggtgattatgatgtgtcagtgtaggttcatcaactgtaacaaatatatgaccctgtgggggatgttgatcacaggggaggctatttatgcatgtgtgggggcagagacatatgagaaatctctataccttcttttcaattttgctatgtacctaaaattgttcttgaaaaaatcctttaaggcaaaaaataaatttaaaaaaatagaataaaaaactcctaaaccaaatttattcagatttctattttataacatttaccttaaatcctctgtagaaaaactaagaatatacattaataaataattctcatctcttcctctggcttctctaatttcttatcacttagatatttccttcagatgtcattttattcacatgccttcttaggctctgtttatctctcatataaaatcattgattaataatttgtgcacatatgtagaagggaagggaggtcttttcttcttcctcctatcacaacctctaatttttgcatgtagattttgtttggcttgtagatgttacttaagaagagcaaatctactgtgataactgctaccccatatcatacattacttctttctattcgtggtcttaactttgttggtgagaactctattttatgttttctgtatttctcttttcttttgcctactttactctgcaatatgccatattttaccttgtgggcatgagttccaaacaaaattcttcctggatgactgtgtgggtaccctacctaaaagcaattagttattgcaacccaaattaccaacacaatataactggatcatgctaatttttggtttagtactttactgtaggttattgaagctgtttggcattttaatttttcaaaatgcttcaggaggtttttgatcactttataataaaactttattaagcaagatacacatataacattattttacaaaagagctgagacactggcatgtggtttggtataagagtgaaggccatggcctctgaaatgggactacttgggtttgagctctagctttttcacttaactactatgtgagcttgaataaattacttaatccttctgtatttcagttattgatcttgttttgtaatctgtaaaatgggcattaaaatagtacttttagctcatagattgatgcatatgtattattactttggtgatttttaattgtcataataaaacagtcaaaactagtctgtagtaaacttgtacataattacatttaattgctctatcttcttgcctcatggctctttgttgttgaatttccattatccagagagagctgtcccttgctctctcgctctttacttggactttggagaacaacaacaaaaagctaccatgtgtaaaatgaagctaaaaagaagttgatgatttaaataaatgagcatgtttcttataaaattcaggaaggataaagaactccactcagttcattaaccagttactaaatggtgtttgcattatccacatgaatactaaatgaattcattatgatatgtgctattacagtgaatagcaaatgaactcataactatgggctccataaaaatattcctaatggagaagttatgcattgtcaagctgctttctagagtaactggggcttatattgaaatgggcaaaataaataatatgaggcacaacattggttagttggagttattttagtaggttctttagaactgaaaatacagtttatgtcttgataaaatgtcagtggcctcagatcactccattatttgtttatgtcctttattactgatggctgatgtctagctttgtctgtgattcaaagacaaagatacaattatatgcagctggtcaacaggaaagctttggtctgtgataagacagactatgtgaaaaagtcttgaagagtttgcaaccttttctgctcagagactatccaaagaaatggttagcacacttcatcaatctcaggtcagttgctatacataaaatccagtgaaccccctcatctgccaactttttctcagtataagaataaaataatttttagaattaacagcatgattggtgtacccctgaagtaatatttggattttattgaccatcataaatagattatgaaatcatggcagcaacaaaagcacagatggtgtcttataaacctgcaaactacaagtgatgagccctaagacgagtcagagggcactcgtgggccatcagtggtctagaaaccacactacacactatgataacctctcatttaaatgcagaattaatttcttaggaaaaaaatgacacagcatcttggtttcatggtaaaattaaaatacttcctgtgctgaattttcaagaatcaccagttttataagtaatcctaatctatggattacatttgagcctatgaaagtaaaatttagcaagaagtataaacagtagaaatagaaagtaaaacttcactaatgtaagcagtttaacaattcagataacattacttgcaggcccacaatgcccaaggcattatggggaatgcacaaataagactgtattagacttccagaaatttttaatgtagtctatcatgtacctatttaaacatgatatacattaaactggaataagacttagaaccaatatacacatatgcagtgtgaataatagcagcaaaataatagcaaacatgtacataacactttctatgtgccaggaactgttttaagtaagcactgtacataaatttattcatttagtacccacaataagcctgtgctgtgggccctattattatctccaatttacatgagaggatactgagctgcagatggttaagtaactcagaggtaggtaactgaccacaacattgtcatgctttacttccatgatggagggttgttgctgagaagcagctgctgcatgtagagaatgatgagattgtagaagaggggagagccacaagattcatgataccgtgagaaagaatttttgcagattagagagatcatggagcctagagaaggattttccaaaaaagggtttttttttttttttttttggtttgacaattagaacatcatggtgtttttaagtaagtggcacgtggaagtagtaggacatggaagttatttccagattgtttctagttaaggaaatacgagggcataaaaaattaaagatagtttttgaaaccttttttttttttaagaagtttggtcttgagtgccaagggagtagggatgaaattagttttcgggtattaaaaaagtagaaggagttttacaaaataagcatgaagtagatttaagagtgatcatcagagaagagtcaatggagggagagagactgaagataaaatcatcctctatgaaatcatatgcataccttctaagctactgttagcagagaaaattgataaaaaatacagctctttggttaattacattggctggatatcaccattttgtgagggtccatatggtttgtgggtcatcttcccagctcagagtcttcagatggtcaaaggatcaactttattttttgttatgatccacagaggaaaggaaaagagataatgaccaagacaaagaaagaagtgaacccggggagaaccttcagggaatctaagagaagagtttttttaagtttttcaatgtgtagaccattttaatatcgtgtcaatgtttcctgaagaagttgttggcggtctttaagattcctggactttcaccaaagagagtcttaaaacacacacacacacacacacacacacacacacacacacacacacgcctccaatcaatatcatagaacacaagagttgtagtttcaatttcctctattacttaaatatattatatgtattatggttcaagtacgtttgattattcttaactttgtgaaaacatggcattagagactaacttaataatgacacatttcaggaatgagaaagcttctaacacagcacctagtaaaatgttaaatgaattaaacacaattaaatgagatttgacacgcattatctcatttaacattcacaagaatcctgtgaagcagatgttattatcctgtcttatagttgaggaaacatgttaatggcatgcctaaaataacagaggggtaagaggaaaagcatggtcttgaatggattctacataacctactagtattttcttatgcattacatttgtttcatttgtacttaaaattgaaagtgtaaggcaagtataaacttcaaggtgctattaaaaattgtattttttagtgtaatgatgtctgaaaattgttcacaagtattttactatggcttacacctcagcagaaacagctctcagcactttcaaagtgggactattttatacagcctaaaaatgctctccaataaggcttcttagtagcaactccgctgacaacctcttgaatgtaatgttaagtaagacagaatctagtccgggcgcagtggctcacgtctgtaattccagcactttgggaggccgaggcgggcagatcatgaggtcaggatatcgagaccaccctggccaacatgtgaaaccccgtctctactaaaaaaaaaatatatatatatatacacacacaaattagctgggcgtggcggcgggagcctgtaatcccagctactcaggaggcggaggcaggagaatcgcttgaaccagggagctggaggttgcagtgagcagagataacgccactgcactccagcctggggacagagcaagactccatctaaaaaaaaaaaaaaaaaagaaaaaaaaaagaacagaatgtaaatgggaagaaatgttttcctgggagaaaaatgatactggtctctatttcccctcctggaggtaattgacaatcaattgcttaattgttctcagaatctttcctatttctaccataaatgtcacaataacagcacaaatgtactaatacaatcatttattcattcaacaaactctttttgagtaattattagtggctaggcattgggattatcatttttggatacaaagaaaaatagagtacagaatccattacctcaaggctcttgttctctagcatgtgtgtcttaggtatttaaacatatgttcacaggtacaaaatattgcacatagaactttaaaatgcataacaaaagaaatcatatttgtgataacttagtattatgctccaaactaatagttgtcacagattattcaaattctaaacctttccgggaagaagtgccgtatacagcacttctcttccatcctcgcatctcccttcccaccagtacaatgccttggacttacgtaaagtgtagatttactgagtgccagacaaatgcaaaattggcttttcctctgctcctttcttttacatgtaaaatgtagattcacaaagctaatcagaccctcacaagaatgtaaccacttgtctcattgcttacccactctccttttttgttcccctcccgcttgctctttcccctttaaatattgaagctcccaaaaccatcttttgaaaaagcactggtcacacatcctgctatgacttgcatttcttcttcccaggagtgtcttcaaccttggcaaaattaacctctaattgattgaaatttgcctcagtcactgttcagtttacaaagttacccagctcttctgcttaaatctttctcttaagctccctttaactacctttactggacttctctaccttgttgtttcttagacatctaaagttcagcatattaaaaaccaatgttgtggggttttttaaacataatgatgtccctttattcattgtggtacttcaaaaacaaaatacatacattattaagaaaataaaacacagcaaagcagaattgaacatttgagtactttttgcctcttccttttctcttaccagaaaccatctaaagaggtaaagaatggtaattgttttctagatatgttgaaaatatttttttcttttctttccaacttttattttactttcactgggtacatgtacaggtttgttatggatacattgcatgtcatgggggtttggtgtgcagataatgttgttatccaggtaatcagcatagtacccaataggtaggttttcagtgctcaccctcctcccaacctccaccctcaagtaggccctgatgtctattgctctcttctttgtcaagaaactcaaagtttagctcccacttgtaagtgagaacatgtgatatttgattttcttttccagcattaatttgcttaggataatggccttcagatccatgcatgttgctgcaaaggatatgatttcattattttttatggctgcatagtattccatggtgtatatgtatcatgttttctttatctagtccagcattgatgggcatttaggttgattccatgtctttgctattgtgaataatgctgtgatgaacatatgcatccatatgtttttatggtggaaagatttatattcctttgggtatatacccagtaatgagattgctgggttgaatggtagttttattttaagttctttgagaaatctctagactgttttctacagtcactgaactaatttacattcctgccagcagtatataagtgttcccttttctctgcaaccctgcgagcatctgttattttttgactttttaatagtaggcattctgactagtacaggatggtatctcatcgtggttttcattagtgatattggtttcagtagtgatatcatggttttcattagtgaaatgtggtttcgttggtgatactaagcatttttttcaaatgctcaatagtcacgtgtacatgttcttttgagaattatctgttcatgtcctttgcccacttttttaatggggttgttagttttttgcttgttgatttaatttccctatagattctggatattagacctttgttggatgcatagtttgcaactgttctctccctttctgtaggttttctgtttactttgttgatagtttcttttggtgtgcagaaactctttaattagatcctacttgtcaatttttgtttttgttgcagttgcttttggagtcttcatcatgaagtctctgccagggccaatgtccagaatactaggttttcttctagagtttttatagttacaggttttacgtttaaggctttaatctattttgagttgatttttgtatatgatgaaagggaggggtccagtttcaatcttctgcatatggttagccagttattgcagcaccatttttgaataagaagtcctttctctattgtttgttattgtctgctttgttgaaaatcacagagacatactaagtgtctgtctttatttctgggttctctaaccttttctattggtgtatatgtctgtttttgtaccagtaccttactgtttttattactgcagctttgtgatatagtttggaattgggtaatgtgatgcctcctgctctgttctttttgcttagggttgctttggctatttggactctttttttctttccaaatgaattttagaattttctcttctaattctgtgaaaaaatgccattcatagtttgacaggaatagcattgaatatataaattgctttggacaaaatggccattctaacaacattgattcttcctatccatgagtaggggatattttttccatttgtttgtgttgtctctggtttctttcagcagtgttttgtaattcttgttgtagagatctttcacctccctagttagctgtattcctaggtattttattctttttgtggctattgtgaatgggattgcactcttgatttgggtctcagcttggacattattggtgtataaaaatgctactgatttttgtacattgattttgtatcctaaaactttgctgaggttgtttatcagatctaggagtttttggagagtgattatgcggttttctatgtataggttcatactgtctgcaaggacagatagtttgacttctcttcctatatggatgtcttttatttctttcttttgcctgactgctctggctaggacttctagtagtatgttgaacaggagtggtgagaataggcatccttgtctttttctggttctcaaggtgaatgcatccagcttttgcccattcagtatgatgttggctgtgggttggccatagatggctcttattattttgaggtatgtccttttgtgcctagtttgttgagggtttttaacatgaaagggtgttgaattatattaaaagccttttctgcatctattgagatgatgaagtggtctttgtttttagtattgtttattttatgaatcacatttattgatttgtgtatgttgaaccaaccttgcatatcaaggataaagcctacttgattgtgatggattagctttttgatgtgctgctggattcagtttacttgtattttgttgaatatttttgcttctatgttcatcagggatattgccctgaggttttcttttttgttgtgtctctgccaggttttggtatcagaatgatgctgacccatagaatgagttagggaggagctcctcctccttgaattttggaattgttttggtaggattggtaccaactcttctttatatatctggtagaattcagctgtgaatctgcctggtcaatgcctttatatggtcagtagggttttttttttgttattattactgattcagttttggaactagttattggtctggtcaggttttaatttcttcctgtttaaatcttgggaggttttatgtttctgggaatttatccatttcttctagattttctattttgtgtacatagaggtattcataatagtcactgggttttttgttttgttttgttttctgtgtttctgtggggttagtcttaatgtcccatttgtaatttctgattgtgtttatttggatcttctcaccttttttctttattagtctagctagcagtctgtcaatattatttattctttcaaaaaaaaaacccaactcgtggttttcttgattttttatatgtttttttcttacctccatttcattcacttcagttctgatattggttattccttttcttctgctaggtttggggttgctttgttttcatttttctagttcctctaggtgcgatattatgttgttaatttgagatctttctaactttttgatgtggacagttagcaatgtaaacattcctcttaatgttgctttagctgtgtcccagagattcttgtatcctgtatctttgtttttgttagtttcaaagaatttcttgatatgtgccttagtttcattgtttacccaaaagtcattggaagcagatgtttaatttccacgtaaatgtatagttttgagagttcttctttgtattgatttctatttttattgtgctgtggtttgagagtgtggttggtgtgatttcagttttttttgaatttgttgagaattgctttatggctgaaagcatggtcaactttaaagtatgtgccatgttcagagcagaagaatttatgttgtgtgtttttgtgggggtgaagagctctgtagatgtctgctgggtatatttggtcaagggttgagtgtaagtcccaaatatttttgttaatgtttggctttgatgatctgtttattaccatcagtgtagtgttgaagactcccactattatttgtatggttatctaagcctctttgtaagtctctatgaactcgttttatgcatatgggagcttcagtgttgggtgcatatatatttagcattgttaaatctttttgttgaattgaaccctttatcattatgtaatgcccttctttgtccttttcaatcactgttgctttaaactctgttttgtctgaaataaaaatagcaactcctgctcttttttgttttccatttgcttgaaagatctttctccatccctttactttgagcctatgggtgtccttgcatgtaagatgggtctcttggagacagcatagagttgggtgttgcttttttatacaacttgccactatgcgccttttagatggggcacgtagcccatttatattcaagattaatattgatatgtgcagatttgatcctgtcattatgtttttagctggtcactatgtatacttgattgtgtagttgctttatagtgtcaatggtctatgtacttaagtgtgtttttgtgtgggtggataatggtcttttgcttccaagtttagcactcctttaaggacctcttcttaggcaggtctggtggtaacaaattctcttagcatttgcttgtctgaaaaggattttatttctcctttgtttgaagtttagtctgctggacgtgaaatccttgactggagtttattttctttaaagtttctgagtataggcccagtctcttttggcttgtggggtttctgctaaaagggtccactgttccatttgtaggtgacctgcctcttctctgtagctgcctttgaatttttttctttcaagtttaccttggagaatctgatgactatgtgtctgggggatggttatcttatacagtatcttgcaggggttctctaaatttctgaatttgaatgtcagtttctctaaagaggttggggaaattttcatggacagtattttcaaatatgttttccaagttgcttgctttctctccttctcttttaggaatgtcagtgagtcataggtttggtctcttgacataattccatatttcctggaggttttgttcaatttttaaaattcttttctctttattttagtctaactgagtcacttccaagaaccagtctttgagcactgagattctttcctcagcttaatctattctgctgttaatactttcaatcatgctatgaaattcttgtggtgagtttttcagctctaacaggtcagtttggttctttcttaaaatggctttttcatctttcgtttcttgaatcatcttactaattccttaaattccttggattgggtttcaactttctcctgaatcttgaggatctttgttgccatccagattctgagtaatttcagccatttcattctggtcaagaatcattgctggggagctagtgtgatcacttgggattaagaagacattctgacttttagagttgccagagttcttgtactggttacttctcatcagagtggattcatgttccattaactgtggtgaaatttgagtatagtcagttggctttttttctggatgttttcagagggccacagctttgtgcagggtctttgtggctgagttcttgtccttggtttcacagatgcatatattagcaaagtatttttggtgttgaagtctggactgtggtccagtggatggtgcttcagcataatgaccagtagaaagactcttactcagcctatgtctcctctgtatttctttgtgtttgcagccatgctacctctaaatgctctgaaattgtgggctcctctcccactcaagtgctggccatagatctagacttggcactcccaggcttcacactacatccctggggtgagttaaggttttatgttttctcttcaacttggtggcaccagggtcagggacctttgcagtggcaatggcagaggaactttcagttatctcttggggcaccatttccaccccagagaaatgcagagccactgccaatcagaatgatcagctgtgggtggggtggctgtgctgtgaacccaagctgtgggacccttcctggtgaagaccaggatggatgggggtctcatggggaagacagtctggcctcttctccatatggtgagtgcaatgtgctggaggtatgagtgaaacaccatggctctttgttccttccccagcccaagggcaacaagagccagtacagctgcagcagcagtggcagaggagttatcagtcgcctctgggaactccactctagagagacacagaagggctgccaatgggaaggttcagccaggagtgggcctgctggagcagggggtcaggggttcacaggaaagagaaactgggctcctttctgtatggtggctgcaatgtgctggaggtgcgagcaaagcaagcaggttctttgttcctcaacccaagggcagcaaagatggtactactgcagcagcaatggcagagaaagtctgtgggttgtctctgggtattccactccagagaaaagcggagttgccaccaactgaagttatcaagtgagggcagggcagctgggctggggactcaggtgaggaggccctgcccattgaagagtagcaggggcaggaaccctcatggaaaacggtctggccacttttccataaagcagctgcagtgtgctggaggtctatgataatagttcttaggcttttttttgttccctccccagcctgacggcagtagggatggggcctgcagcagcagcagcaaaggctgcagtcctgttggttacctctgggagcaccaacccagagaaatgcttagctgtgaccagttagtgtgctctgaggggatagattagctgtgcttgggtcctagggcagtggcctttgccggaggaggtgcagtggaggcaaggtctgcagtctgtccactcctctgcactgtggatgtggcctctatcctaaggatgtgcatgagagcctggcctcccttgttggcagggctgtggtcccgggtgccagggagcccagggatccaatttccttggggctgtacataggcctgtgctgcggctctgcccagactctacccagctcttcgtttcagtctggagatcccatggagaggcagtaagggggtatctcctgtgcccagggttgcaaaggtccatggcagaagtgtaggtctctgggttctctcgctcactcaccctttccctgcagtggggagcctcccttgcctgcatgccaatcccagatgggtggctgtactgccttgttcctctctgctctacatgggtcccttggcttccctgatgaatcccaatgtgtccctaatgttgttatttctctcctaacttttcccttatcctgtgctcatgattattattgaatacttgctccccaaatatcactagcacaatgtgttgataatttaaagttcagttcattatttaccgaagtaagagagaataccaccttgatagaactttggcagtgtgtgggaagcgggaaagcaaaatttgaatttgttgagacttttggtttaagatgggtgttttaatgtggggacttgattaggattcggtaagggtcaccatacaactgtttaggattggtggaatcggcaaggtggggatttttgagggaaggaatttaaagaattctagggtacaaactgttgatgctttccattgaagactttagctgtttccagaaagttttctcatgcagaatcaagtcatttgtctgaactaaattctcctgcaattgtaaagtcttattaatgatggcaatagaaaagtcatgctgatattgtgcgtaagttaggtttggaggaggaagtgggtagtttccatccacattgattttggacttctagcttccagaacaagaagacaatacatttctgttattttgaaccatccagtttgtaatactttgttatagcagccataggaaactacaactaatgttaatgaagcaggtgactacacatttttttttaacaacaacaacaacaaaattacctcctattaagaataaccacaaaatcatcaaactggattctttcaacatgtatttattgagcacacagtgtccaatctgtgtgtggacgtacatggtttgagttctcattatctacaaacttgcttgaaacaactgggcagctgatggttatgtgaatgtatacttgcttcatatattcactgtttaagcctcgataatattagacctctcttgtaatttcttagaagaattcattcacaaatgatcattgctaataaaaattccttttaagccgtatttaattggatgacacttagcttgaacacctaacagcgaattatatataaccccatttgtgatcttctccatgcacaactctttgatcccccatttacatcaggtacctaactgtataaaactatccatgacactctagggcactgctttacctgtattttgcatgggcattttctgtgattggctgaataatctttgaaggcagtttttagcatactagctgcagaacagacaataggagcttaataaatacatactgaaagaacccagtttgatgattttgtggttattcttaataggaggtaattttttttggttaaaaaaatgtgtagtgacctgtttcattaacattagttgtagtttcccatggctgctgtaacaaagtatcacaaactgtgtggttcaaagtaatagtaatttattgtcttcctgatctggaagctagaagtccaaaatcaagttgttctcaggaccatgctgctcctgaaacttgtgggtttgcctcctcctagcttttgatagattgctggcagtccttggcattcatgagcttgcagctgcataactccaatctctgcctttgccaccatggcattctccttgtgtgtgtctgtcttcacgtggccgtcttcttatattgacgccaatcacattggattagaggcccagtctactccagttatgaccttgttttaacttgactgatcacatctgcaatgaccctagctccaaataaggtcatgttctgaggtactggtattctgaagtactttcatgtatctatttttgagaaccaattcaacctataacactgacttatataattcacttttgaactagaatgacaaactattggcacctagtgggtgccacaaaatgatattcctttccttccttcttcatgctgggttataattacagtgactattcatgactgatttctgtctgtcccagtgcctttatgcttgtcagaaggtgtgcacgcaatgtggtgaaaattgggtcacccatttacctgttgatcctcatcaactggcaggtggtttctgaggacctgggctttttaatgctattcggtgatttttcttagagaaccatcggtctgcccctcatgcagtatgtagccactgctggtttctttctttgtcattttgtacagtcttgctgcactccctcctacaccacaatatgcttttgtgcaaggagccagctcatttcagggagaggagaggcgtccagctgcccatggaccccaccaacaccagctctgacataggaggggaaacagccccgagaggtgcaaagtattctaagttatggatgttcatagaagggtagtttgttttatttgtaattctttacttttggctgtgcttacctcctgccagatttctaactcccttaacatttaagattgccaaatcaggccatctgtaaacatgaaaagttgtaaaactggggtctttcaccaaagtgatagttttaatattctgaacagaagaaaaactaatattttagttctgaaagtcccaaataatatagtttggagtgggtatagcctctctgttctccatcctctgcatttctcagggttttctgaatgtgggtggatcttggtttgatggccatctttttcttcctctctgtcgagaatgtgccttggcaagcattggagaagcccagcacagcttttgtgagccagaaaggttaaaactgagctgacaggacagccccagctctctgctgttggtgagttattctgtttattctacatatgtttccttttaattaaaatgtcatttttaattaaaaatgaaatgtcaagaaggaaaaaaattggcaaagtctggatgattgcaatgaatgcaagcaggaatagtcagtagagagaaataactttaaaagaacgagactgtatcttattcaccattttggttaaaaagaaaaaaaacaaacaaaacaaaaacaaagagagctttggagggttttgaatgctctctgctgttcatggcaggcacacacacacacacacacacacacacacacacacacacacacatctgctttatagcttgttcccataattaaaaaatatatatttgatgtgtgggcacatgctttaagttaatgaaggatgctgatgggtgccacatctttcatgagtgacagagccactaatgagatgtagcattgactgtagagggcaccaataaattgtgtaaaacacccctgctggccatttatttaatttattttatggaagcataatgccttatagtttaatatggagcttttattttgttataaagacccaagtctacaatggggttttcaagaattatgcatcatttatgcctcccatttcagcatggcactgatagagaatattctacattatgattaaatcctcaaagagatgcttctataggcaaaagcaactgcactagagtttacattatgttttctgcagagtgggaactgacacgtggttaggaatgtggtggggcttgtagaaatcagttgcagaagagcaacgaaaggtagttttggtatggaataaaggaaagaccaatgagaagtgagcctctccgcagcaggtagtgtcttcatttggtcttccatctttatctttttatgccttttttgctcttttgatcatgctgagaaacttcctctccctctccacatttggcaactttgcctcattttctttcctgtatggtgccattcttttccctgacttaggtctttgcttatgttctttcctccgacatgtaatcatcccactataccctccatgaactccccacctaacttctgctacttgctctttgaagctctgtttatgaaatcagttctcaacttcaatgatttctatcctgtaatgacattttttcccttccatcagtaagtcctgtgaatattctttcataactccctggacttcttccttgtatcacttatagcacctgtaattaaatgcttaattgccaactgaatttggttacattttctagaatgtaagctccaggaaggcagaaacagtgcctaccttgcttatagctgcatccctagcacctggcatgatgtcttgtacatagcaaatttcagataaatatttgttgttgattaaatatttactctcagtaaagactgtaagtatttggttagtatggtttgcttaaaagcaagtgaaaagtagtacaggttcatgaaaattgtgaaagggctttataaaccattatacatacctccagtttagctctctctccaatcctgcttgcattctgtgaaaatgaaactaagaattagagtttgattctcataatgatacagaaaaaagctgtaattttatggaaacataattcaataaacctatactgaaagtctactatgtgccagacagagtacttggcacctaatgtccctacagttaaggagctttcagtttggtaaaatttgttgagcaagtaagaattgaaaaacatttttatctacattggctgtcttttgtatttccccaccagtaaatgttatgtaaaggaagcccagttcttacaatgtatatgacaaaatatacttgtgtctatctacaaaacaaaaacctgaaggaaattgaaatgctattccttgtttgctctattagtttattagtatgaaagtattactttattgaaacataaaataaaatggttgaaatgatattgtgtacacattattttctgtctagtactcaattttgtaaatataagtagtaaaagtaaagacatctcttatccatttcactagatttttttacagttatctttaaacatttattggaaagattcccccatttttctttatctccatgatagtcaagaagttctgctttgtgtccagttgaaatatcttctgctttattaaaccaatttctgcttgtttgcacctctgtgtccatggagaacaactgatcagcatcctttatataaaaccttttatattcttggagacagtaatttcctgtgaaatgtttagttgaaagttccataaacttgaagagaaacaaaagggttgtggttactttacacttcatgaaaatattgttgcaaagctttgaatgtaaagacagttacatttacctttctatgtgacaaattaactttagccccctttttaatcgcattttggtttcatcatgatacatttaaattatgtatttcctggcaaatgtggttaattattttggaagtgtatgcacatagcaaccctctttggtttctcttaatttctcggtaaatctttttgactgtattttataatttaaatttataattgtcccaatatgaattattattcatttggaattgattttggcaatttgattctaaaaccttgaaatctaataatggataaccactaagaaaacattctcatgagatatagaaaaaaaatttagggtcgagtgatttaattgcacgaataggtttttttatttagaaaatgtattattcctatcattaatttcaatagtccataattgtccacagtagtttaagaaattcaaacaatatttatgtaacattaaacccaaaatatcactgaaactgcaaacatttatgtggcaatattaatgtgcagacattttctgggattgacagcacacgggcacatggtattaactatctcataatttcttcattctttatgtcaagggagctcttcatggaagttctatgattggagggggtctctatatacattagcacacttctgcccaagtgtttccttggttttggtgaaaggctgccctcttgtgcagagatgagaagcaactgttaaaaagcctcatttagcttattagctgatgcaatttctattggattctaaaatggaagttaatgctatgcttggaacccacaagtcatcttttaaaaatatcaagaatttactcttaaccttcctctggactctttgtaccttagcagggattatgattctcatgattcctccatatgactcagaccgaagataaactctcaccttcaattcaaggaaacagctccccattaggaacagcctatagagttttgctctcaacaaataaatgatgtgtttatttctaattacaaaacattctcatctattactgaatcatataacttaatgaaaaagaaaccagacccactcctttgggtctattgaagtctaggtcttagctttgtcaccgctggaagagaagaaacttgaagaatccttcacaatgttagtactgagaagtgaaaaatagagtgccactcacttctactgttttaggtcttatttatctaagcatctaattgaattgaagaagtagtatttcaaaaatgtatatttgataagtaggtaagatagattattctatctgagactttagtaagttttattttatgtaaatgctttcttgtactttttaaatttagggttttaaagagcttcaataattattgtcacttagaaaagaatgagttgaatatcttcatgaaagttgtaagagtggctaagaaccctgagcaatggtgtctgaattaatcactctgtctctaacgtataactcacagaatgtaaaagtaaagctctgatgtgattatagtttagaattccacaaggtctttggtcaccagagtatgtttgagccccacctttttattagataaggatgacataaaaacaaacagagcctcaaggaaaatgaaaacatgtgtccccacaaaaacttgtacacaaaagttcatagcgggattgttcataatagccataataaccaaaacgtggaaacaacccaaatgtctgtcagtggacaaaatgtgatttatacatacaatgggttcttattcagccataaaaagaaatgaagtactgatacatgccacagcatggatgaaccctgaaaatattacactaagtaaaaaaagccaaacactaatggctatataatgtatggttctatttttgtgaaatgtccaaaatgagcaactctatagagatatgtagattaatggtttcctagagttggggtgattggggaggggaggagaggggaaaagaagacaatggtgacaatgggcacaagggttttttagagaaggaggtgataaaaaatgttctaaaattgattgtggcagtgattgcacaattttgtgagtacactgaaaaccattaccttgtactctttaggtgaattttatggtattagaattatatctcagtcaagctgttctttaaaaagagtaaaaaaagtaaataaattaaaaataaaaacctcctgtgttctgtaaaaagtcttttccttatttcaatggttggtacaaagtctttattcagtactgaaaattattcatatgtgtgcagttagcctcaccaaaccattcttggtttaaagattttatgtctgattcaaacctgctttcttgttttatgagtttaattattatgaacaatcttctctcagacttttctcccccctcccaggacaacatgccttggagggaatgtaaatattttacgtgttgttacaatatttatatgagcagaaacaaagagttgagggtggcactttccctaatgaatgccagcgctggctttgggatcagatctattaagattcaaatcctacttattcattgtgaaatcttgtacaagttctctttgaacgtcagtttccttcaccataaaatgaggatagcagtaccttcttcatatagctgttgtttcatgtattaaatgagataacatattttaagcactttgcaaatttacttagacatgataggtgttcaaaaaatatagaaattaataataataattttgaagaaaataattcaatttatttaaagataatccttatttagctaaagtgtatgaatagaaaacagagttaacagattcctcaaactatttcaatggtaattagggaatttttgcattggtctttaaaagtatgaatatttatagagagttccttattaagaatcattttttttccttcaaaagaaaagccagatacaaacaagtagggaaccattgtagcttttggggaatgggcaaaattattatcttgaggtattattttcaaaataatggattttacttgtcgtaggacactttttctgccttttcatcacaattgcaatcagcacactacctgctttcagcagcaacagaaacagctggatcacccattttgatgagggattactcttcagtatttatagtaacacccatttcaccaagtagggctcaaaagaaggaaaaaacaaacaactgacttctcttgtaacgggtaactgctttcttttgtactaaattttctttcctattgctttcactagcttcagatcctgaagctcatttcgccactcaggggacactaaaaagcagccaaaccaacacagccaatagaaatttaatcttaaaaacataagactttgctttgaaaatcctgtagaaacattaagcaaaatattaaggaataaaaacaagcccatgagcatggcaaaggtcttgaaacctgaacagggactacattctaagtcagacacgcataaatatgtgtcttttctcactgatattaatgaaacggttaattctgttgtcatggcaacaaagaacagctgtgataaaaagctaaaggtctacacataatgcccaatacaaggtctctaattctaaagctgattttcttagctacaatagaagtgatgtgttttcaatatcattctaagctttcacatcaaatccttctagttaatccaataaatagaccagtagcataaaaaggaatatatgtttgcacattataaaccttataaaagaagtttacctatgtccaatgttaagaggggatctgaaaagtaaatatatgctccttcagaataaaaacctactctgagtgaaaccctaaaatgtagaatatgtttgaataggatatcaaggtaattatcaaatgcactattatctagctagtcagtaggaatgtattatatttgagataacaacatcactgctactaccaacagcaacacaacagcaacaataattcaattttaaaaactcactggaacatagtaatgtaagtggcagagtttgttctataggcctattaatgttgtttataggtccactgcaatttgccaaatatattataccagtaatccaaccctggttgtagatgaatttcaggctctgataaagactcatgtaatatttcagcttcattgatgaatctcttccttaccttctttttggccctggaaggtcacctagatttctttgtcttcctcatctcccttcttcataggtctctacaagaactgtcctccctcctctattccatattcttagctcaggtactcacagtttctctcctggattactgtgatcgaacaggcctccaattcattctccagccaaatgtcaaagtaatctttctaaaacataagtgaaatcatgtcccttctcttaaaatctttcagatttcctcccttttctgtctgagaaaaatcaaaagttcttagtatggcttagaagaggcttcacgtgaaccttagcaacttcaccctcatctcctctgatgccccacttgctctgtagtcaaaaagaccttctgaagttttctgaatgggcattatgtttacgatttctatatcattttatagctgactgtcctttactttgaatgtccctttttgctttcccatgtaatgatttccaatttgtagttgtaaatttaactcatattttcaagggtgagcaatatagtgctttatatataatagtttttgaaaaggtcaaaattaaaatattccacagttaaataaattgtagcacagccataatatcaagccattacacaccatgctagagatacacatgtagtgatataaaaaactattgttgctcttttttaaggttattattgggttaaaatcagtatatgctaggtgattcaattttttcaaaattaactttattgatgtatagtttacatagtataaaatactcacatttaaaaagtacagtttgatggtttttaaaaaagtgtatactaccacgtaaccacaatcacaatcaatatatagaatattttctgctattcccttctagttattcctcatgttcatccctggccccaggcaaccactgatttgacttctatcactatagactagattttttttctggagtttcacatgaatggaacttagagcatgtttttttgtgtgtgtctggattttttcttttagcataatgactttgagattcacccatgttgtcctgtgtaccagtagtccctttacttttattggtgattcgcatttgatttggacattcagtaatttattcacatgttgatggatgcttgggtcatttccggttttggcctatcatgaataaaacttctataaacattcaagtacaagtctttacatagacatttgttttcatttctcctggataaatatgtaagagtggaattgctcagttgactggtgtcttagttcatttgggctgctataacaaaaatactatacactggatagcttaaaaaacaaacatttatttcttacagtcctggaagctgggaagtcctggatcaagacaccaatagatttggtacctggtgagagctctcttttcagtttgtagatggccatcttcttgctgtggcaagggacaaagggttctctctggggtctcttttatcaaagcataaatcgcattcatgaaggctgatgtggtttggctgtgtacccacccaaatctcatcttgaattgtagttcccataatccccatgtgttgtgggagggacctgatgtgaggtaattgaatcatggggtggttacctccatgctgttctcatgttagtgtcttgtcatgagatctgatggttttataaggggctttccccttttgctcagcacttctccttgttgctgcaatgtgaagaagggcatgttttcttccccttctgccatgattgtaagtttcctgaggcccccctagccctgtgcaattgtgggtcaattaaacctctttccttttaaattaccctgtcttgggtgttttttcatagcatcgtgagaatgaactaatacagtaaattggtactagggtgtggagtgctgctgtaaacataccccaaaatctggaagcgacttttgaagtgggtaatgggcagaggttggaatagtttggagggctcagaagacaggaagattgggaaagtttggaacttcctagacacttgttgagtggctttgacctaaattctgatagtgatatggataacaaagtccaggctgcggtgctgtcagatggagatgaggaacttgttgggaacagcagtaaagatcagtcttgccatgcaaaaagactgtcaacattttgcccctgccctagagacttgtggaactttgaacttgagagagataattcaggatatctggtggaagaaatttctaagtagcaaaacgttcaaaaggaagcagaatataaaaatttggaaaacttgcagcctgatgatgcagtaggaaagaaaaacccattttctggagagaaattcaagccagcagcagaaatttgcctaagtatctgggagtcaaatggtaatcacaaagtcaatggggaaaattcagaagcatgtcagaggtcttcacggcagcccctcccatcacaggcctggaagcctaggaggaaaaaatggttttgtgggccaggcccaaggtccccctgcagtgtgcagccttgggacttggtgccctgcatcccagctgctctagccatggctaagaggggccaaaatacagctcaagccatagtttcagaggatgcaagccccagaccttgacagcctccacgtggtgttgagattgcatgcaccaaagtcaataattgaggtttgggaagctctgcctagatttcagaggacgcatggaattacctggatgtccaggcagaagttttctgcatgggtggagccctcaaggagaacctttgctagggcagggtggaagggaaatgtgggataggagcccccacacagaatccccactggggcactgcctagtggagctgtgagatgagggtcacttccttccagactccagaatggtagatccactgacagcttgcactgtgcacttggaaaagctgcagatactcaatgccagcccacgaaggcagctgggagggggttgtaccctgcaaggccacaggggcagagctgctcaaggccatgggagcccacttcttgcatcagcataacctcgatgtgagacatggagtcaaaggagatcatttcagagctttaagatttgactgtcccattggattttggacttgcttgggcactgcagcccctttgttttggccaatttctcccttttggaatgggtgtatttacccaatgcctgtacccccattgtatctaggaagtaactaacttgcttttgattttataggctcatagttgaaagggacttgccttgtcttagataagactttggacttagacttttgggttaattctggaaagagttaagcctttgggaactgttggaaaggcatgctcgtgttttgaaatatgagaacatgagatttgagaggtgccaggaaaggagtgatatggtttggctgtgtccccacccaaatctcatcttgaattttagttcccataatccccatgtgtcatgggagggacctgatgggaggtaactgaatcatgggggcagatacctccatgctgttctcgtgatagtgagtgagttcgcacaagatctgatggtcttataaggagtttttccccttttgctcagcaattcctcttgctgccaccatgtgaagaagaatgtgtttgcttccccttccaccatgattgtaagcttcctgaagcttccccagccatgcagaactgtgagtcaattaaaccttttctttataaattactcagtctcaggtatttcttcatagcagcatgagaacagactaatacaaaggctctaccctcatcacctccagaagctaaatcacctcccagaagcctcatctcctaataccatctcattgggggttataatttcaacgtacaaattttgggaagacacaaacattcagcctataagaattggtcagtatatgattacagggtactgtcaaattgtttttaaaagtgattgagtgattttatatcttctcttggtgaatgtttgtttaaatctttggccactgttaattttcctttttctggagttgtaacgttttagaatttttttttctgaaaataagttctctgtcttatgtttgtatcactcaatattatgtaatattttctccctgtctatggcttcctctttactttcttaatagtttcttttaaaaatagaaaggttttgtgtgattatatttttgtaaaaagtgaaacatagacatgcacacacccctttgaaatacagaaaagaacctggaaagatatacacatggtacatacctctgggtaatcaaagtgattacctctaggtggtataattatagttcatttaaaattttctttttttcccctaactttccttaatatacatgaatagcttttataattcaaaaaatattacatgatatgtgaataacattataataattatatatatatatcattaagtgacactcctccgcttcttgatcttctgaatgtgtctttctttcatctttgtattcctggtgactgtctcagcatctgataaaactggtgcacaatataatttgatcaaattcatttagcaaatatttattgagaacctactatgtgccaggaatgtactgggtactgggaatgcaaattgtatatgaaacacagatctcgcaaataagtaatttacagttggataatctctctattgcctatgcctattataatgcctaacacttactagctacttgaaaaatgtgtcaatgaatgaaatgaagagattgtaattgagtcttgtatttcttagcatgatattttttcccagttatattatctatttatttgacactgattttttggcttatctattagagttcagcatgaacaattcaaataaattgtctgtacaaagggttttgcctgaaatggccgaatcaagtgggatataattctgagccctctgaagagctgatgaattttaaaaagagaggtatagggaggggtttggaagatgaaaactttttcattacgtttttctaggtgagctcatcttaaataaaagtagagttcgagtcatctgcctggcatggtaacattttcctttttattagaagtggtcagatcagatctcaagtcacttaagattatcttaattattaacatgactacaatcattctttacatagatgttgcatatgtattacttggtcattagactcaggacaaacagtgtcatccacataatcaaattgaatgatttcattctctggctccaatctcatgatactattaaataatttcctgtgaaatatcaactaccaaatattggatatatttttgttggttactatgtttggtaactgtgtatgatattgtcagctatggttactgtgtttgaacctttttctaataagggcaaatagaaatggtgattgcaagaagtctcaagacctgtgaataaggaaaataattgttctttcagcagatacattctagttagctacattcatgtgtaaatagaataaaaggggggcagggagatattactgcataaattgaacattgactacctttttagtagtggaatgtctttttttataagctaatatttgaagggcaggatttttgggtgttaagcagttatgactggagattaaagcacatttattttaattttatggtggcattccacagggtcagaatttttgcaaatgtaagtttcattctgaattttacttctatcttctgctttgaggataaatcattacctgtaggtggaaatatataccttaacacatttgataatgactttggagcaggaaaaaaccacttttttgagtacaaacataaaaaattctcataatgtttagcttttctagacagaaacatgtttctaggaaacacaagagagttgtctaattatttgtgagttccgaactgcttgtcaacttatgttaaattgaactggagtcatcctttaatctgatcaataaattgccctattacatttactaaacattgctggctagctcatgatcactgctttagtccttttacagggcaactgattataaagttcctttaagcaagaggacttttcttacactttctaatttcatccagtagttgatgggaacagtggtggaaagtctgtggagacaccagtgaaatttgcctgttttagttctatataagagaactccgaaagggagacaaatgttttccatatggttagaaattgctggaataagtcaatcaaccacttggggaaaggtggcttctattgttctgctatagtttcctctaaaacttaatgatcgaagagcagtttttggagggaaggagtgacgtagatttctatcttcaacaattaaaaaccagtaagctgagaccacagtctaatccaactgtaacattaccatctcaccaataaagtcagggtttgttaaagtttctaagtttgtaaatttgtaaattaacgtttgtaaatttgtaaattaacctatcaatacctcaatatccttatttgtaaaattgagataatcctagtatctatgtcattgacttattttgcagttccatgaaatcatgtaaataaagctgtcagggcaatggatgacacataatggcagaataagtattaataattattattactgttagtaccattgttactgctattatttcccacttttattattattactattactgatatc

SEQ ID NO: 519 - DNA, 12543 bp, Homo sapiens
agggcaaactctatgtcctctaggtcttcgtggttgattggatccctgcccacctctttgtcccaatcactaatggtcagatggaacacacccacgtagccataaagattgttagaacattgaaaatacttccttatcccaagcacacctacaccaaatgttccctgacatcctccctcctcccccagcaacctgtcagaaccccccacaattcagcaaccaaaggaccaatgtctgaccaactggatcccctaggctctgcatatgcaatattttaaatagtcccctgtccagcatcatcctttgccaggcttctctccctgctccagccacaccagcctttgccctgtctctccgaatatgctgttccctctgcctggtacttgataccttccactccctgcccagttatctctgacttatccttcagatctcccccaagtgtcactactacaaggagttatcataagagagggtctattataaaagccagtttggttctggtttttgcaccccttagccatgtgatgccttgtgccaccttgggactctgcagagagtccccaccagcaagaaggcccttgccagatgcagcccctcgattttggacttcccagtcttcagaactgtcccaggcttttctgactcccttttgaatggttctcttcatgctatgtgttacttctgtggttctaatcacggttgtaattttacattgtttgtgtgattttttaaaaatcagttttccagtgctaaactgtaggcttcatgaaaacagagagattgggcctgtatgttttatctccaatgcctatcaaaatactgacacatagacacatagtattccttctcccttgagaaggggaatggaggagatgcataagagccatttataggaatgtcttaagtcatagacaaaaaaaacaaaaaaaattacatcctacttcaagatcatggtgcctgaaatcccaccaccagtatgattctgtaaggttggacatttttggtggattaccaattaagcccaaaaccccattttccatatggagaaatcaaggcccaggtagataaaatgagttttccaaggccatacagtaattagtgacagaatcagggttcttgactcctagtccagtgctttttccactccaccctctgctattctttcttcatcccaggaattacttccaatgtccaaacttctctactgtaaatatccttccttctcattcccttcctgcagtctattttctacacaacatgtattagacagaatggagttgggagccatggagaagagaaatctatgcagccaatgaggaacagaggcaagatcctttaaccaaaggtcctccacctcaccatgatgcccaaaaggaattagcctaagtttgttctgccacaacacacgtggactcagtcaatgacagcctactgatgcaaggtcaagtgcaatcttcttagcctgacatgtcaggccttagatgatctggcccttgctctgtctccaccctatctcttgctattgcaactcatatcccacattgcagtcattctggactggccttaaccctattctcacccctctgatcctttatgcatgccacttctcctttctaaaaggcccttctcttaatctatcaggccaactaatagccctctgtcctttggggcctgcctcaggaatccccttatccaggaagctcttccaaccttcccccaaattaggttagattgggttgcaaacccactgcaccctgactcctggcctctcactactcaaccatgagatttctgaggacagggaccttgccttgggcatgctgtgtctctgatgctgaatcatgtgatgcttatgaagcatctaccacatgttaaatgcatatcagacatgggctgccatggagttaatgtttggcccctctgaaactcatgttgaaacccaatcaccaatgtcgcattatgaagaggtgggacttttaagaccctcattgggtcatgagggctatgccttcataaatggattaattcactcaaggattaatggataaatggattgatgggttatcagaggactgggttggttatcacaagagtgtgtctattataaaagccagttttgttttgaccaggaagtgccatgtgtcacttctcttcacagctcattggccagaaccagtcacacatgcaattgctatccatgtgatgccctgtgccacctcaggactctgcagagagtctccaccagcaagaaggccctcaccagatgcaaccccttgattttgaacttcccaacctccaaaactgaaagaaataaatttgttttctttataaattgcccagtctcaggtattcagttgtagcaacagaaaacagactaagacactgggggtacaatgatgaatacaggtctctgttcttgtggagtttactgtcagtggatgagacaaagagtaaatatgttagttagttagttgcttacttcatttgttcattcattaaatgatagattgttattagtgtttaaaataaatagtgtgtgatgacagaaaataatgggggggggagggtgggcaactctggatagagtcatcagggagtcctctctgagaagggtgagatctaacctgagacctgaaggataggaaggagccagccatgagaccaaccaggcagaggaaatgcacaggcaaagaccctgcaaaaagaaagagcttgttgagtctgaggcagagtaagcagctcagtgagctaggggctgatgagatgaggttcaagagggaggcaggagccagattacacagcaactcagtgataagtgcaacaggaagccattgaagaactctgatctggctgctgcgtaaagaatgaatttgggggatacaaaggtaggagtagggacattaattaggtgactattccacaaaatttggcaatgatgatggaagttcagactagggtagcaggagggagaagaaaaattgtgtgaagataaatctgatatctcagtagttaagtaacactcaatacatacagagtttattttttgcccacatgagagtccagtgtgaattgggaagtccttcatcttgcagctctaccatttggaatacatggccttcaaggcctatcagggaaagagagagatgaaggaggcacgtcatgggttcttaactgttttgaccaggaagtgtcatgtgtcacttctcttcacagctcattggccagaaccagtcacatgactccattctaactgcaaaggagaatgggaaatggcggggaggacatgggatatctcataagcactttctgatggaaatggacttactcaagataccctttcgaggtagaagtgatctgacttgttgatagatcagatgtagggatttgggatagtagtgataaagaaatgggaagagtaagggataattcccagatttccctcattagcaattgggtgtagatttaacatatcccaaactaaactattgcccttcccttccaatgaatctgctctcttcctccatcttagttggtgaaaattccatgtttctggtttctcagttcaaaagccttagagtcttacctgaattgtatactttaagtgggtgaattatctcactaaagctgttactatatgtatatacatatacatgacacatatgtatatacatatatacacatatctagaatctgttcacttattttacctccactgctactaccctggttccagccaccaccatctctcacctggaccactgaaacacagcagccagagtgattctgttataatgtaaaacagaataggtcatcatctgcaaaatacacagcaaagactaaaaccacattctttgcaatggtctacaaaggcctacatactatgacctctctttcgtaacccttgaccccacctcctcctatcatctcctcttattcattctcatccacccacaccagccttcttgctgttcctccaatgtaccaagggttcttgtctcagggcccttgcacttgttgttcctgctctctgatttgctcactcatacatctccttctcaatactttgctcaaattttacctttatagtggggtttccttgactgtcctatttaaaattgcaatccaaccccaacctcaatgtgtttaatcccctttactctatcaacacttttagagtatttatcaccttctaatgtattgtataattaattatttgttatagctagcattattgttctgcctttcctcactaaaatgtaaatttcaagagaatgtatattattgttttgttcactgatgcattccaagcattcagtagacattcagttagtatttgttgattaaataaataaataaatatgtgaaatgtgtcatcacgtggaatggagaagtctctggaccatagtaggtgctcagtaaatatctattaatttaatatcagtacaatattgatccacggactggacttagaaatgtttcccactgcatggggatagggattaaatgagattatgcataaagtgcttgacccatagtagattctcagtaagggttaatttactatgactttgcctcaaaagttatattcttcattctattagtcaggattatccagagaaatagaaccaatagaaaccaagaaattgtgtggggtgtgtgtgtgtgtgtgtgtgcgcgtgtgcatgtgcacatgcatgcatgtgtgtcaagagaggaagagagagaaattataagatactgccttgtgtgactatggaagctgtgaagtcccaaggtctgcagtcagcaatctgggggccccagagagcccatgtgtagctccagtctaagcgcagggcctgagacgggagagttactggtgtaagttttagtttgaaagttggcagcctagagacccaagaagaacccgtgttttttgttttgggtttttttgttttgttttgttttgtttttttgagacagagtctcactctgtcactcaggctagagtacagtggtgtgatctcagctcactgcaacctccacctcctgagttcaagccattcttgtgcctcaggcacctgagtagctgggattacaggtgtgcaccaccacgcttggctaatttttgtatttttagtagagatggagtttcacagtgttggccaggctgctgttgaactcccaaccttaggtgatccacccgccttggcctcccaatgtgctgggattacaggcatgagccactcactgtgcctggtctaatgtttcaatttgagtccaaaaggtggaataaaaaaagatatcccagctcaaaacaggcagaaagagtttcttcttatctgtgggagagtcagcctttctgttctatttcagctttcaactgattggatgagggccacccacattaggaagggcaatctgctttactcaggctattgattcaagtgttaatctcatctaaaaacagcctcactgacacagccagaataatatttggccaaatatctgggcaccccatggcccagtcaagttgacacgtaaaattaatcatcacatccatcttagaatatgatttcttctccttccatatatccaaagtccaaccatccttcaaggcccagtaaagaaccacctcttcctacaagccttccaccacactccttttcactctgagttctataccatttttaaactttatttatagtcaacctcagattctctctgggtagatgtctgtgtgtaacttctttgccagtgcattcttctatgaactctcctggtgatgtttcattcactaatgctttttttttttggcatattctttcttccatacacactccacctagtccttctggcaatgtatacagtatgagagacaggcatgccttccaactgtctcatcacaaagttataagaaatagaagttaataaacaggaagcaacatataaaaacattgagtcaaagagatggcacacaaaagctgaaatttccattgctgccaatattccaatctgtagatgggtctttaacagtccccaaagtagggagcccatgagcccatgttctcaggcctttcttcctcctgacttcagttcggcattctctgatgtggtgcttcaactctcactcctccttggatcctctgtcacctccaatcttcccaacactccagtagccatgctgttatttctggaccatcctcagcagcatgcctaacttcccatgatacttggaaatctactttccatgcctcaaagaattaatggaagagaaagaattcataaagagacctggggtttgccttgcacaatgccatctttgcagctctgcaatcccacgtcttctcctcctgtgtgtgttcgtatggagcacttactggaaaatccatttgaggatcctctaagatctctgcccagtcagatacttctcctcccacacccttctggccatgatgctctttatatcaaagcatctacatgctgcaaagtgggatcatcctatggtgtatcttttctgttggacccaagcatacaccgggtttctccagctggccactaagtctgagggccagttcttagtccaatctttttttgtatctccctgacttttagtagtaggtgctcctctaatccctgctaatcactgagtgataccaatacagatcagaggattagctaattcagtggagggatgctttttgagagtagacattaggctgctagtagcttccaccagccaaaatagtttttattttaggtgacaggggtcacacgaagttgaggagcacttcaatgaggaaaacattttttgagtatctattaaatataaagtattgtactgtagcatttaccaagtgtttaccatgtgtaagacatcatctcatatgcttcatatatatccatacaccttaaacaatttaatcctgaaaacaactctggtgagggagcattataattatactcccttgacagatgaggaaactgaggcacacagatgttaagtacaacagcaaatgggctacaagagaccaggcagatacatgatactatcacgaagagcagagtaagacaaataccacaagaaaagaaagcagagagggtagttctctcacctgggatttccgtatgtgctttgcctacctggagaacttaacatgtccttcaagacccacctcaagatctgtgcattttagtaaagccttctctaaccccttcccccagcagagctgtctccaccctttgttggcccctcctgctgagacatagcattggcccaaccccaatcaccttgcatgatgactgcttccatatctgcctccctcgctgggccatgaactctcctggagggcagggacagattgtgcttcaaggccttctcagcaccaacccttgttgatgataaagcagtgaggcaggcttacctaaaggcctccatcctgaagtgacatgtgacttccactcacattccattgcccgcagcaagtggcatgcttctggttgcgttctacacctcacactttgcctggtgaaattcagctatgccaaaacaaaaccaaaaaaaacatggggatggggactgccagttggctgagtgacaaacaggtggcggatggccaagccaagtgggcatatcatactcacaactgggacgcctgcaaagaggcacttctggaaatgtaggaaagttgtgagtctggatggtgtgggctatggtggaagcctttgggacacagaaggagcccacgcaccttcttcataattcttctctttatgttaattatcagcctgaccttggacagggccctttcccaaaagggtcctctttctctccattggcaaaatattgggctacaagcttactgtcttgtggttgtaagattccatgctcttgacaaccatgccaggcacctgcctcatctatgtgccaaaaatgttatctaccccctagtttgggatcctgagaaattttagcaaaatttgccaaatactatagagaaatagatacttttcctttcccatttttaaaaatcatctttttttctacccacaacaattttctcctcctcgaatactgagttccacgagtgaataagctatgtcatctctaagtttccagaaatgtagattccatggatcgagggaaagaagggatgaaccatcttttccctttcgtcacaggaagctgcagcacatttccaaagtaagatgggcttctaattattaaaaataaactctggcccacagcctgatttgcacattaatgtagccagcagatgcagacttgcaaacatgctctctggctccatactgagacccagcttctctgcccatttttcatgctgagattctctaaggacaaccatttctgtttggagaaccatgaaatcagctaattgctctctcaaggaaggggatgctgccctagggcttaagggggcaatggttccctagattctgactaaggaacttaaggaagatgaaaggaaacttaagatatgtagatatgttgggaggccaaggtgggtggatcacaaggtcaggagatcaagaccatcctggctaacacagtgaaaccccgtctctactaaaaatacaaaaaattatctgggtatggtggcgggtgcctatagtcccagctacttggaaggctgaggcaggagaatggtgtgaacccgggggcagagcttgcagtgagccaagaccatgccactgcactccagcctgggggagagagtgagactccatctcaaaaaaaaaaaaaaaaaaaaaaaaaaaaaaatatatatatatatatatatatatatatatatacacacatatatatatatacacacacatatatatatatacacatatatatatgtagatatgtattaagacttttaatattaagtggcagaaacaccaactgatactggctaatgcagaggaagtggggtggggggttgttgttaatttgttttgttttgtgttgttcatgtacctgaaaagtctagaatgtgggagatgattactagtttcaggaatggctggatctatgtgctttggcaagctgattaggagtttgtctttctcttttctagctcactttcctcaatgtgcccttttactctcaggcaaactcttctcaagctgtaacaagatttcatccccataggtaaataaccccagtgaagagaaattctgtttcctactagttcccacaaaagtatcagaaatgacccttgtacaatttaaatcacatgctcagtcctcaaccaatcattgcagctttgggatagaatacattaactgatcagatcagagcacatggaagtagggttgaggtccaccccactcacatctcatgaactaagagtacaaaggggtagttccccaaagaaaaatcaactttaaaacctggactaaatatgtgcactgttctgaggactctgtatagtaaatactaacaggtagatagggaagtaagaccagaactcaaagttctattgaagttatgaattattttttcccctctgttattctaggaccagaagatgacatggccccctgacaccctgatgtggtcattaacataaatagagagctctaggagacactgtatagttctgggtcaagaagtaggaaagggaactcctactcttagataggaatgaactgaaaaacaccatcaacaaataagaccttactgacatttatggaataccctcatccaacaaaagcaacattcaatttttttcaagtgcatattaaatatccaccaagatagagcatgatcctggatcataaaacaagctttaaccaatttaaaataatggaaattatacaaagtatgttctcaaactataatggaattaaactggaaatcagtaagagaaaaacaagaggaaaatatctaaatgctaacatattaaacaacacacttctaaataattcataggtcaaaaaagaagccccaagaaatatgagaaaatatttgaactgaatgaaaataaaaatacagcctatcaaaatttgtgaagtgcttctaaaatagtgcttagatgaaaatttatagtattggttaaaaaagaaagaaaaacaaaactgaaaaaaagaaaaataaagatctcaaatcagccatctaggcttccaccacaagaaactagaaaaagaagagtaaaacaaaaccaaagtaaccaggagaaagaaagcagtaaaagtaatgcagaatcaatgaaattgaacctgaaaggctatggagaaagttaatcaagtcaaaggtgttttttcaataattggaaaaatcaaaatgtgtctagcaagactgacagagaaagaagagataagatacaaatgattaatatcaggaatgaaagagaagatatcactacaggtcctgtggccattaaaaataataaggtaatactacaaacataatacatataaattcaaaaacttagataaaattgaacaattcttggaaaaccacaaaaaacaaaactcatccaagatgaaatgaataacctaaatagtcctatacttattttaaaaattgaatctatcttttaaaacctttcaaaaaagtcatttccaggcctgatacctttactagaaattctacaaaatatttaaagaagaaaaaataataattctacacaatttctttcagaaaatagaagtgaaggaaacatatacccaactcatttcatgaagcctgtataccaaaaacatacaaaaatagcgacaaatagaaaactgcagactaatatccttcataaatacagaagcaaaatttctcagcaaaataatagcaaccaaattaaaaaaacacatacacaaccaagtggaatttatagcaggaatataaggctgatccaatatttaaaaatcaatcaatgtaatctactatattaaaattttaaaaggcaaaatacatcatcatacgtaatccagaaaatgcatttgacaaaatgcaacaattcatgataaaaaaaaaacctctccataaacttgaaatagaagaaaacatcctcaatctgacaaagaacaaatgtaaaaagcctacagctaacattctacttaatggcaaattatgaatgtttttcttatcagattgggagaaaggcatggatgaattctcactgctcctttttaatattgtacaggaagtcctagctatttgcaataagcagagaaaagaatcaaaaggcatacagactagaaaagaagaaataaaaccttctatttgtagatgacatagcgttctatacagaaaatcccaaggaatctataaaagcttctaaaactaatacctgagtttagcaagattgcaaggcaacacacaaaatcaatcatattgctatatattagcaatgtataattggaaaacaaaattttaaaacaatgtcattcacaatacccctccaaaaagtgaaatacatatataagacctgtatgctgaaaactataagaaatgcttatgaaagaggttaaagaagacctcaataaatggaaagatacaccatgttcatggattgcaaaactcagcatagttacaatgtcagttcttcccaaaatgatctacatatttaacacaattccaataaaaatcccaggaggatttttttttaaatattgacaagtggactttcgaatttatatggacatggaaaagaactagaatagccaaaacaattttgaaaaaggaattacaaagttggagcacttacactacctgattgtatgatttcctataaagcttcagtagtccagatagtgtggtgtcagcaaaagaacaggcacatagatagcataagggagtttcttggggtgatcaaatcgttctatattctgattctagcagtggctgcacaaacctatacctgagttaaaagtcatagaacagtacatccttccaaaagtcaatggtactatcttatacttttaaaataaaatttctttttagaccttttaattgaaaaataaacttccaaggcgttaagtcagttcactggcgaaaagaaaatgtttttaacagaagcgctgaaacaatccatatggaaatgaatgaacttcaactctatcttcattccatacacaaacataaattaagacagatcatagacctaagcataaaagtgaaaaccataaagcttctagaataaaacacaaaagaatacttttgcattcttagattagacaaagatttcttcagacattaaaatcacgaagcataatgaaaacaataggtaacttgaacttaaattttaaaatccctacttatgaaaagacgtcattaagaaaatgaatagtaaaaaacacaaatggggagaggtttttgccacatttatatctgacaaatgacttgtgtataacacataaagaattcctacaaatcaacaataaaatggcaagctaccttttttaaactgggcaaataacttaaaagatacttcacaggggaagatacacatatagctaataagaaatggtatttaacatcaatgcaaattttaactacagtgagacaccgttttatgctcaccagaatggctattctaacaatacaaaatgtgg

SEQ ID NO: 520 - DNA, 1927 bp, Homo sapiens
ctaggtttgtaacctatatttaaaagtagaacatttaaaacattttagtagtatatagcactgaaaagtggctttttagcgtagacagttgtttttcaagaaactattttgtaatcctagctacttgggagcctgaggtgggaggatcgcttgagctcagaatccagtctgggcaacaaaggagaattccagcctctttaaaaaaaaaaaaaaaaggaagaaactatttgggagttttgtgaacaatggatatgcaaaaagacaggccattgttatgagaggcctaattgtgagtaccttctagaattgtatataagcatgattctcttcaatagtaaaatctcagcctcttcattttagaaatctaatataggaaaaagaacacatttctccatagttgtaaaacataggttctcagggtgaatgcccatctttgagcaagtttgtcttcctaatggtataatactgtaagtctgttatctaattttggcttgttgtcacttatttttcataatcaaagaaaaatgatttaattttaaaaagatgctctcctttctgttttcttctcttggatgatagtatccctatctgtctgagtttatagaatcttaatttttacctgctcttaccacatacatctgattagtcattaagtcttactgattctgcttcagaaattttgttttatgcttcactctcatgctaccaacttatttggtagcttcagcagttgtctaagctggggttggcaaattttttctgtaaaggaccaaatagtaaacattttaggctttatagcccatataaagtttttttttaattttttttttttttaaaaaagaaagaaatgtaagaacccacacctgtaattgcagcactttgggaagccgaggcagggtggatcacgaggtcaggagttcaagatcagcctggccaacatggtgaaaacccgtctctactaaagataaattagctgggcgtggtggtgtgtgggtatgtgcctgtaatcccagctactcaggaggctggggcaggagaatcgcttgaacccgggaggcagaggttgcagtgaaccgggatcgcgccactgcactccagcctgagcgacagagtgagactctgtctcaaaaaaaaaaaaaaaaaaaaaaaagtaagaatcatacttagcctggaggccatacaaaaataggtcacaagcaggctgtgggaaggatattgtaagtgggccatactttgctgacctctggtctaggctattacaacaatttcctaattggagtatttgtcaccggtattttaccccggtgtaagattgcctccatcttacacattactgccagaatcatctctctgaaatgtgaccatttcacttccaggtaaaatctttatgtgctccttttagctaagttttcttgcttaaggtattcatgtattacttcggggattttttttttttttgccatttcttcataaccatctatattatttattcagtatttttatagacttttttttcttaaaggaaagtttatactgtgaatggaaaatcaatattgattgccataactagaaaaccaacaaaaggcaacagtaaaaggaaatatagaactatgaaatgcctgtttcatgtagcacccaatcatatatgtactacatttcaaaaagtcactggcttataaaaatattttttagcatctcatacaagtctcttcataatctgttatacagctcaccttacttgcacgattgctgagccaaagcagatcgaaagtcattttggtaagaggctagatgctgaccttgtattctgaaaatctgatgattctactgttgttgatgtgattccaagtaagcctgtgtgaacttctgggctattctcagggaagtgtttatgacacattgttgaaggtatcatcagggcagttga

SEQ ID NO: 521 - DNA, 3159 bp, Homo sapiens
tcccttgagtatatacccagtaatgtgattgctgggttacatggcattttttctaatactctgttgaacaggtgtagtgagagagggcatcctcatcttgtgccgatttagaaggggaatgcttccagcttttgcccattcaatgtgacattggctgtgggtttgtcatatatggctcttattattttgaggtatgctccttcagtacctagtttattaagggtttttaatatgaatgggtattgaattttatcaaatgccttttctgcatctattgagaaaatcacgtggtgtttgtctttagttcagtttatgtgatgaatcatttttattgatttgcatatgttgaaccaaccttgcatcccagggataaagcctacttaattgtggtggataaactttttgatgtgctgctggatttggtttgccagtattttgttgagaatttttgcattgatattcatcaaggatattgacctgaaattttctttttttgttgtatgtctgccaggttttggtatcagaatgatgctggtctcataaaatggattaaagagaagtctctcctcctcagttttttggaattgtttcagtaggaatggtaccagctcttgtttgtacatctgatataatcagttgtgaatatgtctggctctgggctttttttggttgataggctatttattactgcctcgatttcagagcctattaattgatctattcagggattcaatttctttctggttcataccagggagggtgtatgtgtccagtgatttatctattttttctagattttctagtttacctacataaaggtgttcataatattatctgatggttgtttgtctttctgggggtcagcggtaaaatcccccttgttgtttctagatgtgtttattttaatcttctcttctttcttcttgattggtttagctagtcttctatctatatgattaattttttcaaaaaccagttcctgaatttgttgatactctgaatggtttttcatgtctcaacccccttcagttcagctctgattttggttaatttcttatcttttgccaactttgggattgatttgcttttgattctctagttcttttagttgtgatgttacatttttaaatggatatttttctaactttttgatgtagacatttagtactataaatttccctcttagcactgctttggctgtgtctcagaaattttggtatgttgtatctttgttcttattagcttcaataaatgtttcctttctgctttaattttataacttacctgagagtcattcaggagcagattattgcattttcatgtaaaagtataattttgagtgaatttcttagtcttcagttctaattggattgcattgtttatatggtttggctatgttgtcacccaattctcatcttgaactgtagtccttgtaatccccacgtgtcatggagggactcaatgggagataattgaatcatgggggtgggcttttcctatactgttctcgtaatagtgaataaacctcatgacatctgatggttttataaagggcagttcccctgcacacaagctcttgcctgctgccatgtaagatgtgcctgtgctcctcctttgcattctgctatgattgtgaggcctctccagccatgtggaactgtgagtccattaaacctctttttctttatagccagtcttgggtacatcttttttttttttttttttttttttttttttttttttttttttttttgagacggagtcttgctctgtcacccaggctttagtgcagtggcatgatcttggctcaatataacctccacctcctgggttcaagcaattctcctgcctcagcctcctgagtagctgggattacaagcatgcaccaccacacctggcaaatttttttatttttagaagagatggggttttctcatgttggccaggctggtcttgaactcctgacctcaagtgatatgcccaccttggcctcccaaagtgctgggattacaagtgtaagccactgcgcctggcctggtatgtctttattagcagagtgagaatagactaatactgtaaattataactgtgagtggggcactgctgtaaagatacctgaaaatgtggaagcaactttggaactgggtaacaggcagaggttggaacagttttgaggactcagaagaagacaggaaaatgtgggaaagtttggaaattcctacagacttggctcagaatacaggaagatgtgggaaagtttggaacttccaagagacttgttgaatggctttgaccaaaatgctggtagtgatatggacaataaagtccaggctgaggtggtctcagatggagataaggaactagggaagtatgacaaaggagactattgttgtacaaagagactggcgacattttgctcctatcctagagatttgtggaattttgaatttgagagagatgatttaagatatctagtagaagaaatttctaagtggcaaagtgttcaagaggaagcagagcataaaagtttgaaaaatttgcagcctgacaatgcaatagaaatgaaagacccgttttctgaggagaaattcaagccagctgcagaaatttgcataagtaacgataagccaaatgctaatcaccaaaacaatggggaaagtgtctccagggcgtggcagagaccttcacagcagccccttccatcacaggcctggagatctaggaggggaaaatggtttcttgagccacgtctgggtgccccccaccctgtgctgtgtgaagcctagggatttggttccctgtgacagccaatctagctgtggctaaaaggggccaaggtatagtttgggccatggcttcagagggtgcaagccccaagccttggcaactttcatgtggtgttaggcctctggtgtacagaagtcaagaattgaggttcgggaacctctacctagatttcagaggatgtatggaaatgtctggatgttcaggcagaaatttgctgcaggggcagggcctgcatgaagaacctgtgctatggcagtatggaagggaagtgtggggttggagcaaccacacagaatccccactggggcactacctatgggagctgtcagaagaaggccactgtcctctagaccccagaatggtagatccact

SEQ ID NO: 522 - DNA, 100080 bp, Homo sapiens
gaatgaatgagtggctgaataggaagtgtgggctggtgtgtttagcctcaaagcctgtgatccactgactgaccctgccatagtccacttcctccaaggcctctcatgtcttgccagtgcagagctgcctctctcctctgaacacacagctgtcgtggtctgcaccagcactgggcagtgatgcatgggctgcttctcctccttgtacctgctttgatgatttgacagttgcattatttcacattccccatgataaagcccagtgcccagctgaatgataaatgttccttgaaggcatgtattgtgaagtagaagaaaaagtcctctgctgaggggcggagaacagctgctttaagagagtgacaagggttggagcagcgatgtggagcatgtctgaggctccagctctgagcacaggtgtgggaacctgagcgacacccaaggagtggggcatgattgcccagagggccatagacaaaggaggaagggtgctatgggaccaggttctggagcacagctgaacctgagaagcaagcagataatatccccaggcatggttgtgcagggatgagcagaggctgaaactcatatgagaggacgggctgggttcaagacatcagatcagtgtatctgagtttgtaccagtgtgtaagaagtttggccaaaggaggaggcctggagtgcaggggctttgctaagggttagaaagagcccaggggacccactgaaggaaaagctagaccacactgaacagagattaggatcccttgtaggtgtaagggagacaatctccttgcagacctgtgttccagttctagctcctctacttagtcagtcttaaactgggtaagtgtcttaacttttctgagctttggcttcctcctctgggaaattaaggtaatattgcctacctcatagggattaaatgggaggacaaaggtgaagcatgtagcactacccaagaatgtaatgtctgcagcagtggaaggctaagctgcatggggatgagcttcctgaagggcatgggtgaaccaagggtctttaccttgggcagggattctagctcatgggggagacagggtgtcttagtctgctcgggctgccatagcaaaataccatggactgggtgtcttcaacaacagaaatttattttctcacagttttggaggctggaagtcgaaggtcagggtgtcagtgtggttggttcctgatgagggctcatttcctggcttgcagacagctgtcttctgactatgtgcttacatggcctttccttgatgtgcacacgtggagagagagagaacacatgctctgatggctcttcttataaggacactaattctgtcaaaccagggtccagccttatgacctcgtttaacttaattacttccttagaggcctcatatccaaatacagccacattgggggctagggtttcaatggatgcatttagagttgacacaaacattcggttcataacaagtagggtaaagggtagcttaagtgacaagaagtcctctgagcactctgaacagagccccagtccagtctccccagtgtggcctggcttttcataccagatatgagaatggttgaattcagttttgctcacctggaattgtccttaaagtgatattccactgtgcatattggaaaactcagtcttcagagttcattgggaaatcaccatcaatactgctgcttttatcctgtctttgggaagtggagtagggtctctcagatacgagaaacctcatcagaaggaaagcacatgttctgctgccaccttcatgcctggtgacacatttccatctggagcagccacagaccataccactgagaccataccactgcactccagcctgggtgacagagtgagactctgtctcaaaacaacaacaacgttttccctgtggggaatgccatttcttctttttagagtcaaattgtgtcctattccatttccagataccgttttctaggacaagttccccagacaggaatctcgacattctttcagcagcatcgttccacagtgatttgccctttgtattctttttaacgcattcttcctgtgtatgtattgaatgaattccaaaacaaatgagtgagtgaatgaatgaatgaatgagttgttttcattgtgattgtggttccccaagagcagagtttattctttctttccacacacacaaagaaaccctactggccagtagatcgcccaataagtgttagcttcttacatgacaggctccccgtcagagagctattcactcagttcataaatttggaaatctcaggaatattttgattttcactgcattggcctttttacaccatgtttactcagtttcaaccttacttcaataaagcagaggcttgatcatactctgcacagcctactgcatgtctcggtgtgatgagtggatcttgagccacagcagggactgccaatctgtcattttctgaggaatactccttttttattggctctgatattttcatgtgtgatctcagcagctgtgcctttgtgtttgaaaagagccaggtctcactgaggagctgtgtagccagtagcatttattgagtttctgctttgtccctccacgtaagcagtaggaaccctgggataaattgtgcccatcagggaggagatgcctctatctctggggagcttaggaaggagctggggagacaggacatacacaagagaggttccatgaggagcactgagaaaccagaagatggtttcatgattcctgggggccagttaacctgccagggcttctctctccctgaggaggagtttgataagaaagactgggttcaattagcagctgattaggagacatgaacagagtaaagtgcactttccagacaactattgctgactgctcctgtgggcagggggctgaggaaattgctagaccaggggtgattttgcccccaagggaaaatttggcaatgtctagagacattgttggttctcacaactaaggtgggggaaatgctactggtatcgagtgggtagaggccagggaggctggtacacatcctgcaatgcacagcacagacccccaccacaaagaatcatctgtcccacaacatcagcagtgcccaggctgaaaaacctcatggcagcctgagtgagcgtcggggcgtggtctgagtgctgggaactgggtcacttttcctccttgggtctcagtttacttatctgtgacgtaatgatctcttaggttacattcagccctaacattctgtgatttggtgaagctaactttaactagagattaaaggtgggatgtgaatgtctttagaatatcgtgctttaaaaaaatcagaagaaatatggagggcatttaagagactttctaggaaatagcgcttaacctcaggtaaatacttaaaactttgaaccatttcaccctcttaaggagctgtacaaggagctgaaagggcctcgttctagtgctttgtctctaaggaaggaatttttgttggcgctcaagggacagcccagagcagaatcttctcctcgagttacacaggactaagatgccagccaagggcacctgagggccccttttcaagtcttgtccccactgccaagtccccgaaaggggaagcctttcccacgcctgcaccattattccacctcctctggctgaatttgagccacaccctcacctgatacctgtctctgttcatatcaaaaaaagcctgctcctctagaccttaagaaatgaccagagggagaatatgagaaaaaaaacaagctctacctgtgtggggaagccagcctaaagggagaacagattgtcagaattgccatgctattacatgtactgggactttccagaaaaagcaattgcttccaatagaatccccttgccacaaaatagtaaaggctgtttaatgaactattttaaaaatccaatgttaaaaattcaaatcatccttgtaaagcatgctgtttatgaagagaaaattccacaggaagataaccctgatgaaggatctatcaccaggtcgtacgtatgataattttaaatttcagaatgtttggcaatgttttcatggaagtgtcaggaatttcgttacagtcacaaatcatgtatgtgtaattagaatgctaaaacagcacattttttctatcaatgtaaactggggccccaaaggatgaaaaaaaatttgtagatgcccattactctcatattacaaagcaaggtaagtccaccgtcaaggacttactaaggggccagccggtagctgttttgcaaccctaagcccatttaccgacgtggaggattactctggatctttggaaaggttgtcaatgtgtcagcttctctgacccaccagggccatggcagagggaagaggtgcttccttctcaccaagtgacaagggagagatcaagaggaatactgagagagcttgatgctcatccgcaggttagaggagtgcaggaatggataagagcagagagagaggaagaaggctgcgttgagagccactgctgtaccccagctgttggggcaagaatgcagtttttcagtaggccaaccagacctctcctgagggtccagtgaggagcctgtcacagagcctcgcccaggtgggctgcatggaggagtgactgggccctgacaaaggggaagtctgtgtgaggtagacccctggatgatccggcactgaggttcagtgacaggcagaaaaatggcggccgcatcataggtgtttcaatgggggattcacagcagagccatctccaaggccccacacaagctttcctggagacaaatgccagcttcagacgtccgccaagtcctgagtgcacaacgtcctattatatctggtcctattatataacccaaagactatgactattttttcctaagtccccttcataggccaactctgggaggacctcacaggctacaggaggaggaagtagaatctagaagaaagagaaagaagcagccaagctttcccatatctgcccttcaggttcctaggacgaaagcacagaagctctaaatcataagaagctggagttgttattctaacactggaaggaacatttttaaagtgtacagaatacttgtaagagcgagggccaggcgcggtggctcacgcctgtaatcctaacaccttgggagtcttcagtgggtggattgcttgaaccctggagtttgagaccagcctgggcaacatggtgaaacgccttctctacaaaaaatacagaagttagtggggcatggtggcgcacacctgtagtcccagctactcaggaggctgaggtgggaggatcatctgagctcgagaggtagaggctgcagtgagctgagaccataccactgcactttagcctaggtaacaaagtgagactctgtctcaaaacaacaaaaaccccataaaaaaacaaaagcaaaaaactgatggctcctcagtcagtctattagccttgttcttccctggggttccctgagggatataaacccatgccccaaggcacccatttctgaattcactcctctcttttgcagttagaatggttctctgagcatccttggaagggatgaggggctggcacagtggctcatgcctataatcccagtgctttgggaggctgaggtgagaggatcacttgaggccaggagtttgagaccggcctttccctgaaaacaaaaaaaaaaaaaggaaggatgaggaaacagtcatccaaatcattttctgtcctgtcctgtgttcacataaagaatcttgttttacattaaaacattttaccttcagaagaagtttaattttatttctcaaactgtacattttatacccagaaaatccaaagtctttcataacctggcccctgcttaccactccccatactcccttcatttgtggataatcatttacatctccatggctttgcacaggccatttctttctttaaaaaaaaaaacaattaattttatcaaatagagatggggctgttgtccagactgttctcgaactcctgggctcaagcaactctcccacctcagcctcccaaaatgctataatcacaggcatgagtcaccgcaccggcctggagaggccgtttctaactagaatgctgttggcttcttgtacttcagtaaagaataaaatgaagactgagagaccaatgattgagagatgaggggaaaagtttcactgccaagcaggaaatctaatccaaaacagagtctagtttccctggtggatgagattcaagggagaggaaatggggtaggtctttaaaagccaaaacgtattgaactgtctctatcctattttaggagagcaaagtcttggcatgttctaattggtgactgatatctgggcttgttgattaggaaaccacagagctggctgaaggtgacctgctgtggtcgcatctggatcacggtgtgtacttgtctgtgatgtggctgtgaggcactagaatggggattatggtgtctgggaaattctcctgcctaatatcccctgtccactattccaccctacacgccagctcgactgagggaggccccttcctctgtgctgctgtaactctcaggctcatgcctccctgtgacggcactcaccctgtgtcttgtttaatcattgattaatccttgtgtgtccagcacccagaacaatgtctggaacactgtagccacctgcggtttatttaatgaatcagtaacaatagcatatgcaaattgaagatttatcatttctattgtttcctctaaagtatacacaacagacatttctttagaagtgacatttcaagattcaaaagaatgtagttttgaattgaagtggggtgtagagaatgatggtatgaggcaatatgaatatcttggtaggggttcaacttatcctaactagtgatttaaattaatatttatgtagatttgatttaaatcaaatccatcttggaagggagaaatgtttataacagatgggcatataatagaaccctgtaataaaatctaagtttaaagctcagcaaattcctttcggcttgcagatggagttgggaaaaacagttgacattggtgagttacagttagtttctcaggaaagctagtgattcaagaatgaagggtgtttttctgctagaaaggaagtactgtagagaagatgaattctgtatccaaagacatgtaagagaagatgtgggaatgacagcaggaaaaagaggctgtaccttaaacaatagccagatggaaacaaacagaatagcagatagtggtgggtatgacttgatttttagtgccattcattacagtaagtaacatttactgagcacctacattgtgcctggcactgtgctaagtgcattttatgatttatctctgtattcttcacaggacttaggggaggatgctaatattatcaccagtttacatatgaagaagttgaggcttaaagatttttttttaaagcagcccaaaatctcaaagcatataagttatggggcccgactccagaatctactgttaaccatcttttcatgacaagaaatagaaacaaaactcaaactaactcagaaaaaagatggatgtcattgggaggaatactagggcatctgacaagactcagagatgcatttggacattagggacagctgcaaccagggtctggaatgctattcttttctttttttattttgtattttttgagatggagtctcactctgttgcccaggctagaatgcagtggcacgatttcagctcactgcaacctctgcctcctggtttcacgcaattctcctgcctcagcaccccgggtagctggggttacaagtggccgccatcatgcccagccaatttttgtattttagtagagacagggttttaccatgttggccaggctggtctcgaactcctgaccccaagcgatccaccacctcagcttcccaaagtgctgggattacaggcgtgagccaccgcgcccagcctggaatgctattctttttctctgtctcttatttctccttctctatgccttttagctttattctcttcttctgaagcttagcttttttcacttggcaggaatacagatgattaaagctggtgacctcctatcttatggagtcaagcagcaggaaggattggttcttttcccttagttttagttcaaaaagtccaatgatgggcttagtttgagttggggcctcccttgttttccccaacccctcttttccagatcagtcatctatggctaaacagtctgagaaaaattattggcttagcttggattaatcatgagcaagatcatatagcacaaacacggccttgggggccatccctgtgtcccggacaatcctggagaaagagataacactttaaattgaacatccatccccgagtggatgcttaaaaatgcaataatgaggaacacaggttactttaaacgtaaaatatttaagtgagaaatgcatagctgtataactgagttgtatggggattccccagaaatcagacagtctgtgctttcagaaaatgtacccagattttttgttcttaggcacaattctggagaggcattctaagctattgtttggtacttcttatttattttttaaacagtagatttccttcatgatgatatagttctgaaaataagtgagcctgatgacaaggttgaaaggatttttgttttcataagcttcttcatttcagtaatttcagagactgggagtcacacagtctgcaatgtttaacaagccttcctatagtatatagaagctccttttcataaacatccctaaagtcatcgtgccgcaagttaagcctgttttctttgagtttgttctcagaagaaatgggtatgagcatagaagcttcccttcatcaaaccacgtagttgcatcctcagttcctagcatgtcccctctgggtttattgtccagtcagcccttttattatctcagttactctctgtgaatctcctctgccatctccacgtacccctttttgttgccaagcccagatctaattggtcagtcttttagtgaaaccccagagcaacaaagacaattcctcaccccacacccttccccaggcatcccgcaccacagtgattgtttaagcacagggccacaggccaacttgttgcatttgaattccactataaccagcattgtatctgtattctaaaaagtgtcaagtctctacattacaatcaaagcatcaatctctaaacagtgggggagaaaatgtacctcaaggttaagagaatctaggctgggagtggtggctcacacctctaatcccaacactttgggaggccaaggcaggtggatcacttgacctcaggagtttgagaccagcctgggaaacatggcaaaaccccatctctacaaaaaatacaaaaattagctgggcatagtggtgggcgccagtagtcccagttactcaggagactgaggtgggaggaccacctgagcctggaaggtcaagtttacggtgagccatgatcatgccattgcatcccagccagagtgacagagaccctatctcaaaaaaaaaaaaaaaaaaagaaagttaaaagagtctaacagcaagtagaacaaatggaattaatgatgacagttcgatatattgtgcccatcacagtcagcagatccaaaacagccactaagcactagatccaggagtccccgggcctttgcacccactgttccaaacactaccaaggatgctgttttcccagacagcccatggcacacttgatgggcccatccagatcttctcacagaaagtgtttctcagtgaggctttccttgaccatcctatttaaaactgtgactttctggttcagaccagcccacccaagtccaccatcagttgttcccaatcctcttttaaagctgttttatttttcctggcagcacttactggacatggtctatagttttagttgtctatctgtaattgtctgtctaccctagtagaatgtaacttctgtatgttttgttcactgctttattcctcatctcttaggagcatgcctgcctaccacagagggacccttagtgaataatcttttttttttttttttttttttgaggcagagtctcactctgtcgcccaggctggaatgaagtgtcgcgatctcagctccctgcaagctctgcctcccaggttcatgacattctcctgcctcagcctcctgagtagctgggactacaggtgcctgccaccacgccaggctaattttttgtatttttagtagagacagggtttcactgtgttagttaggatggtctcgatctcctgacctcgtgatccgcccgccttgtcctcccaaagtgctgggattacaggcatgagccaccgcgcctggcccatgaataatctttaagtgaagaaatctatgaatgcaagtagaattctttgtggtgaggaagagcacttgaacatttttatttatttattttatggagaatgtatataatgcttgctatatgctaaacactgttctaaatgattgacaactatatctcatttaatcctcacaacaatcatgtggggtaggactattatcttccccattttgtggataaggaaacataggcgcagtcatgaatcacagtgggcgtgtggcctattctgagtctgctctcaaacactaccatgctgcctttattaattaaataactgaaatatagcagaaacacaaaattggacagatttgggctggggcgagccacggagagctttctgggcaaggtgaattgagcacagatgctgcagaggaggcagtgaatcaaatccaagtgtgggagagacgaactgggagactcagaagtggcaaaagaaatggagagaaggatgtgcaggtgagaacagggatgcggggcccccaggatatacagagagaagcacaggcactaggagagactgactgagaagcctggacaaactgaatgaggcgtccactgatggcccccagggacccttcactacggcctggaattcaggagccagcatccagccagtggcttacgcaaaacaagggttggggaagcaagtgtgggcatgagcctaagtatatgtaatttaagagtgagatggggaaagagtgaagaaggaaagagagaggaaacacagattctcagaaatttgcattcataatctctcatctctcccctaatcttagattatcaaatatattcatcgattaaaacttctttaagaagtgagtggataaaccaattgtggtatgtgcatataaagaaacactgcttagaaataaagagaatgaacaacattttggtttctttcattccacttaatcaaaatgaaatcattttcattccacttaatcattttggttgatgcaacaacatggatcaacctcaaaatgattaagtggaatgaaagaaaccaaacaaaaagtataatctgtatgattccctttacataaaattttaggcaatgcaaaccaattgatagtgacagaaaacgggtcagtggatgcttggggatggagctgggggatgcaggaaggactggaagggagggattacaaaggggtccaaggaagtttttggggtgataagtatattcctatcttcattgtggtgatggtttcacaggtgttcactagtgtcaaaatgcatccaaatttacactgttttcccaaggtttttaagttgggaactctcatcttctcctaagatttgataaataatttcttgtcttctaggttttcttcttaagttggagatgaggggtggtggttaaaaactcctgcttagcttattttccctttagggattgattacacttatttctgtctcccttgcctgtgtgagaaaacctctccagccctggagcaacttcttggggcttctaagtggattgaattctggtccccagaagatatgtctacgtagaaccacaaaatgtgaccttatttagaataaaggtctttgccagaccttatttagcataagagtctttgccattgtaattaaggtaaggatgtcaagataaaaatcatcctggattagggtgggccttaaatccaatggtgattgtcctcatgagagatagaaaaggacagagacaccatagagggaaggccatgtgaagacagagacagagacgggagttcctgcaagccaaggaacactaagaattgctggcagctaggcacggtggctgaggcctgtaatcccagcactttgggaggctgaggcaggtggattacttgagcccaggagagcagcctgggaaaactggcaaaaccccatctctacaaaaaatacaaacattagctgggtgtggtggcatgtgcctgtggtggtcccagctactcaggaggctgatgtgggaggatcatctgagcataggaggttgaggttgcagtgagctgagatcgcaccactacgctccagcctgggagaaaaagtgagacccagtctcaaaagaaaaaaagaaaaagaaagaattgctggcagccaccaaagctaggagagaggcggattctccttcagagcctccagcaggagccctacatttgtgttgttttaagctcatagtaatatgttatggcagctcaggaaatcaggccactaggtacttttgttgctactgtccttagttctaccactgtattttgtttccgctgtttgttcttcattctctgaactaatcctgttagaattttattctcttagtatttcaccatttctacctagctgaacatgttcattaacttcttttttttattattttttgagatggattcttgctttgtcgcccaggctggagtgcagtggggcaatttcagctcactgcaacctccgcctccaagattcaagcaattctgatgcctgtctcccaagtagcagggattactggcgtgcaccattatgcctggctaatttttgtgcttttagtaaagacgggggtttgccatgtaggccaggctagtcttgaacacctggcctcaagtgatacacctgtctcagcctcttaaaatgctgggattacaggcgtgagccactgtgcctggccagaaaagggaaactttgagaagttaatgaacattggccgggcagggtggctcacacctgtaatcccagcacgtcgggaggctgagcagaaggatggcttgagcccaggagtttgagaccagcttgggcaacatggcaagaccccattcctaccacccccccccacacacacacacacacaaactgggtgcagtggtgcatgcctgtagttccaggtactcaggaagttgaggcgggaggattgcttgagcccaggaggtcaaggctgcagtgagctatgatcacaccactgtactccagcctgtgggacagggcaagaccctgtctcttaaaaaatcataaaaataaaaaagtaaacaaagtttccatttccttgtctgcagaatgagcgtgagttcctatgcctggggttggttgtgaggattcaatgaatccatacatggaaatgctttagaacagtacccagcacgtaacaaatgctgtattcatgtcattaccgttattactaggtactgctcacactttccaaggggtggctctctggtagcttcttcaaaattaatggtacattttcttccatcagggttattgatgaaatgttgcattagtcttggatcttgggtgatggtgtgagaaagtctttgcatgggtcctgggattaattctgaactaggttttcagcaaatccccttatgatctctcccaacaaacggaaaacctcagtggtgttaaaactagtcatggtttacctcaatggttggagatgagcaaagggctcccaggccattgcttggtccaccatcgaagccaatttactgttctttgttccacagcttcagcctaactttaggcatccttttccatgtgtgggccattggtcatatgcagaccgagcaaaaaaatgtaggaggcttatagaaaacccattggcatgtttggaaagacagaagtccacactgtgttgatgtgtggttagcagcatcttcttcactgtctgactacatatgaaactgactttaggccttgccaccactttctttctcaaagaaatatgaagaaattatgtagaataataaatatggagcttccaggtagtaagtttaatggaatgagtttagaacttttcacctccttaatgggttgtgagttaacctaagagtattttttatccataatttgcaatgcactgaggaacaggtaagcaaaacaaaatcaaaagcttcatcaaagccaagaaagattgcagctttcattccttctatttgcaaagcccttcaatgtcactgaaggctaagtgtctagctcccctctttatcaagccatgctgcctgtgcatctgctatggactcgatgtttgtgtcctcccttaatccatcactgaaatcccagcccccaaggtgatggtcttaggaggtggggcgtttgggaggtgattagctcatgagtgcagaatcctcatgaatgggattagtgctcttataaaagagaccaagtggctcatgcctgtaaccccagcactatgggaggccgaggcgggtggattacctgaggtcaggagttcgagaccagcctggccaatatggagaaaccccatctctcctaaaaatacaaaaagttagccaggtgtggtgacgggcgcctgtaatcccagctactcaggaggctgaggcaggagaattgcttgaacccagaaggcagaggttctagtgagccaagattgcaccactgtactccagcctgggcaacaagagcgaaactccgtctcaaaaaaaattaataaataaatgagagacccgagagctcttttgccccttctaccttgtgagggcggcaaaaagacagctgcctcttaatgagaaaacaggccctcaccaatgtggaatctgccagcactttaatcttggacttccagcctccagaactgtaagacataaattccggttgcttataagccacccagcttatggcattttgttataacagcccaaatagactaagacaatattctttttattattttaaaaaagaaattaaaggattctaaaacacataatttaagcttagagatttgtgatttccagaatcatctgagacttaggaggtctgagcatttgatatggtttggctgtgaccccacccaaatctcaacttgaattgtatctcccagaattcccgcatgttgtgggagggacccacagggaggtaattgaatcatggaggttggtctttactgtgctattctcatgatagtgaataagtctcatgagatctcatgggtttatcaggcgtttctgcttttgcttccccctcattctctcttgctgccaccatgtaagatatgcccttcaccctccaccatgattacgagacctccccagccatgtggaactgtaagtcaaattaaatttccttttcttcccagtctcgggtatgtctttatcagcagcgtaaaaacggactagtacaccattcatctatgtattatccaaagggcctctgttgtgacttcacccagttccattcaccatatttatatggtctcttgacatgagaatatagttttatgtgtatatcatttttttaaaaatcagaaagcaatttaatgttttcccctggtaaagtgttttgtatgttggcaaatcagggacttgataatgagtgcagtactggatattgagctaagtcagttaattgggctttggctctttagaagggtttggtgaagctctgcttatgggtaattgaggcttcaggttgccaagagttgggtgactaagaggtagctgttttggatcaagggtaaaattttaattagatgatgagcattctcaaagggcatgtagcaattttctgaactgcataatctaatggttcgaaatttagaaagtagtgatgtcatctctccatcttttcaaagaacacacatctgcctctgtaatcattttgtttattatttttaataacagcaataggccaatgctaagtaatatgatgatcaggaaagaaataggccccggggatatgtgaaacagctttgtcagacagtttcagctctacagaattgtgttttcttgatgaaatttctggcaaagtcttctttccatgttttcaaagtctcctcttcctcctcgttgtcagttcatttcctgtttcaaccttccaaggggtttacctatgttaaaatgaactgagttcaaatatagtccttcccagataaaaacttgtgactttctcttttcttgattgattttaatgaaatatatgctgaaagaagtaggaaactcactgagaatgtcaaacataatctgcaggtcattatatacccagagtttacagagggtaggaatgatatctattagtactataacgaatctgtttgcttgcagagtggctttctgacttgctgccagcctgtgcctattccacacttacactttttgacatttaaaatgcttcttaataaatcttagtcagttattattattattattttcatttgcattggaaaacagcattcttccttaccttccatagaaagggtgcaagcaggtctactggcacccacctgcctcacagtgcctggagcttaatagatgctgagtgatgcacaaatataatggatgaattcatttaataaatcctctttttatttatttattgtttatttttatcatattttttaagacacagggtcttgctctgttgcccaggctgaagtgtagtggtaccatcataggtcattgaagcctaaaattcctgttctcaagtgatcctcccgcctcagcctctggagtagctgggactacaggcaggcaccaccatggccagctaatttttttttttttttttttgagatggagtctcactctgtcgcccaggctggagtgcagtggtatgatcttggctcactgtaatctccgcctcctgggttcaagcgattctcctgcctcagcctcctgagtagctgggattacaggcaccgccaccacgcccacctactttttgaatttttagtaaagacagggtttctccatgttggccaggttggtctcgaactccttacctcaagtgatcggcctcccaaagtgctgggattacaggcgtgagccactgtgctcagccggccagctaatttttaaaattgttttagaaaagggagtctccctgtgttgcccataatcatacaatatgcaaccttttgtgtctggcttctttcacttagcataatgttttagggattcatctttgttgtagaacttcatttctttttatggctgaaaaatattccactgtatataaccacaatgtgtttatccattcatcttttgatggacatttgggctgtttccatcctttagctattgtgaatagtgctgctatgaatatgggatgtacacgtatttgtttgagcccccgttttcaattgttttgggtatctatccagaagtagaattgcttgctcatatggtaattctatgtttagctttttgaagaactgtagagctgtttcccacagcagctgaaccattttacattccaccagcaatgtaccagggttcttgtttctccacatcctcctcaacacttgttttcttcctttttagtaagaaaaaaaaatatatatatatatatatatatatatggctatcctagtaggtgtaaagtggcacctcattgtggttttttttctttttttttttccttattattgttattattttttaatagagaccgggtctcaccatgttccccaggctaatctctaactcctgggctcaagtgatcctcctgccttagcctcccaaattcctgggattacaggtatgagccaccacgcctggtctcatttggttttttgggttttttttcttctgagacatagtcttgctccgttgcccaggctggagtgcagtggcatgatgtcagctcactgcaacctccacctcctgggttcaagcaattctccttcctcaacctaccgagtagctgggattacaggcatgcaccaccacgcctggctaatttttgtatttttagtagagacagaattttgccatgttggccagactggtctcgaacttttgacctcagatgatccacccaactcggcctcccaaagtgctgggattacaggcgtgagccaccgtgcccagcctcattgtgtttttgatttgcacttccctaatgactaatgttgagcatcttttcatgtgtttgttggacatttatgtattattcttagagaaatatctatttaagacctttgcccatctttaggttgggttgtttgtctttttattgttgaattgcaggagttttaaaaatatatcctggatactagaaccttatcagatatattatttgcaaatattttctcccattctataggttgtcttttcactttcttgataatgtcttttgaagcacaaaaggttttaattttggttatgtgctgtggtttctgagcactagggaggcccaagcaggaagatagcttgaggatgggaggtaaaagctgcagtgagctatgaagctatgatctggccactgcactccagcctgggtgacagagtaggactttgtctctaaagaaagaaaaaaagaaagaaaaaatttaaaattttaacgaagtccaatttatcgatttttttcttttggctgctcatggtgtcctgaagctttttaaaatgacaggatcctaacacttgtgaaggctatgtcacgggcgtgtcctcaaccttggaaaaataaactttctaggttaattgagagctgtctcagattttctgggttcacacaccttagaagaaaactagattatttcaggaaggtaacctgtaccttaaagtcaaaattgtgaaagtatggatgtaacagctcttttgaaataattagaaggatacaagggccagaaggagcctcatacatcatttagaaaaggttctggaggaattttactttaatacaaattaaacaccagtggcagaatcataaacattttcaaactaatatagattagaaaggatggcatttggggattattatttttataatcagaagggcttgagaaaaagtttgcggaaaataaatacgtttcaacatttttctctgataattcattttgacaactactgtgttcattttgataactactatatcactttataaatgatgaaactatttcaaatgtaatgactgtacttttcacagtttgtatgcctataatttatgcaatgccacacaatcaaccaaacaactcttaactttatttttacttcagtgtattatttagaaatgatataaggaggccagccgcgttggctcgtgcctgtaatcccagcactttgggaggccaaggcgggcagatcacgaggtcaggagatccagccatcctggctgaaacccaactctactaaaaaataaataaataaataaataaaattagccgggcatggcggcatgcgcctgtagtcccagctactcgggagtctgaggcaggagaatggcctgaacccgagaggcggagcttgcagtgagccgagatcacgccactgcactccagcctgggtgacagagcgagactctgtctcaaaaaaaaaaaaaaaaagaaatcatataaggaaaaaaagccctacagtttactttctggttcttggttattatcaaagggcattggaaggttaagctgctgtaatagctttaaaaggggaatttaaggccgggcgcggtggctcacacctgtaatcccagcactttgggaggccgaggtgggcagatcacgaggtcaagagactgagaccagcctggccaacatgatgaaaccctgtctctactaaaaatacaaaaattagctggtcgtggtggtgcgcatctgtagtcccagctactcaggagcctgaggcacaagaatcacttgaacctgggaggtggaggttgcagtgagccaagattgtgccactgcactcaagcctggtgacagagcgagactccatctcaaaaaaaaaaaaaaaaaaaaaaaagtggaatttagttaagtttgggagacagaaagaagccacggctctcctgccttcttccaaatatactgaacttctgatatgtttgatcaaatgaaatgctcatggtctggcatgattataggtgcaagcctgtaatcccagctactagggaggctgaggcaggaggatgacctgagcccaggagtttgaggctacagtgcacaatgattgtgcctgtgaatagccactgcactccaccttgggtgatatagtgagacccacatctctacacacacacacacacacacacacacacacacacacacgaagaagaacataaacacatcaaatgtgagccattttgctgacttgggcatacaataaatccatatctctgggttctaaagatgtaccaatcttgcagtgagctgagatcacactactgcactccagcctggtcaacacagcaagactctgtctcaaaaaaaaaaaaaaaaatagtagaccaggcgcagtggcacactcctgtaatcccagcactttgggaggccaaggcgggcggatcacttgaagccaggagttcaagacccacctggccaacatggcgaaaccccgtctctactaaaaatacaaaaattcaccaggtgtggtggtgcattcctgtaattccagctactcaggaggctgaggcaggagaatcacttgaacccaggaggctacggttgcagtgagccaagattgtgccactgcactccggcctgggcaacagagcgagactccatctcaataaataaataaataaataaataaataaaataaagatgtgccaatcaaacaagtgtttgctctgtagatgaggtgagtgctcctgatcagatagtatattcaataaaataagcatgtcatcaaactaactttcttggcctttgttctttggttgaaaaactcccgttgacctcatgaataccacatttattaaccccggaagacaacagatagctaatgcaacataaatatctgtggctttaaaaatacatattattatgtgtgcagtctacaaacactttcctgaaattggtcttctgtgggcagtgatttaaacttttcaacttggacgcttttcctactgggggctgtaaagatgataactcagcccttactcttcagtgtttctcattcccgtctcccctacttcggaatgaaacacaatatcttaagcaaacagagcccaaagaggctgatcattggctctcattgtcccctgatactgtagccccgcccctttggcttgtgctgactagctgtttatattttagtaagggccaccctttaactcggcagcttgatgactataatgggcccagttgtctgcgggctgcggggagctaagtccccagattggaggaggctggctctggtcttcgatgcacaggagtggccgttatggaacgcaggtaaggacgcttctcaatgtgggataattctttttctgggccagctggttaatccggggctgggagaaacaagttgtgattgggttgctactttttcctggttttaattttttccctgcagaagagggaaggaaaagactgggatttgctgacaaagctcacagtgagctctgttaatccaggcaggaagggagtaaggaagcaaaaaatcgagggagagacacagctggatttgacaccaaagcaacatgaatgtggcaaagcataaggccagttccagtgatgttgtgagactcaaatgctgttttatttcctaacataggtagtcacagtcaggagcttagctgggcctctccggggtttctgtaagccagctgctagccgatgtaactcagtcgaccccatttgaaaggacctaatatctgctagtattttcaaagggcaaactgtagtagtcttgcatgttataaataggtctattcagaaatgtgggaacagtttagagcagacaggagactgtaaagttttactgccccataaaagtgctcaaagggtactatgtccctctgccgtgcgactgtggaatgaagaaatagccccaggtgaatagagcgtttgtccttgactacccaagtgagaagtcagcagagcctggggacgccatgtgagtcgggggtgaagcctgatgtgggctcagccagccacacctcggggtgcttgctggtttccggggtgtgaatgggtgagggtggaaaaccactcaggcaccggtctttggtgcctgctttatctcttggctggcccattcggtgctcagtgaggcacctgtcgtagctcacggggtgcgcaaagggcaaggaaagggttgtgctgtcattgcgacctgtaaggtggggagggggctacaacatctcgagtcctgggagttgctttagaaagtcctcctcctcctgctgaaaaaaagaatcacctacggcagctttgatcagataagtttctggtgagccccgtggtgtggagtcagtgaacttgcggtttgtgtttgttatcgacaggagcctgataaaatgaaaaggtgaggtttaatttttacataaagctagaggtgaaccatgggactttaatacatttaatgctttgaaagtctccccacctctccaaattccctcaacttgtatctattatctaggtacaccttgtttaaagccaccatgctgtttgcggatcctggaggtattaagtcagaatacaaagggtgtttttcaaatgaatttgacgccaagcaacatgaatgcttgaacccattgtatgaaaacaggcagtctctaagtgaggccaggttctcctggtgcggtcctagagccctggagagggatgagtcaccccacgaggaggtcctgacaaggaatggaaattctgactctgccagtgaacttttgactctcccaggtggggtggaggctccaaagggaaaggacaggtgtgcatcattcaccctccaggcccaccgcaggcctcacaaatcccatttggtcaggtcaatgcattctcaccttcccacctaagtaggtgtcccacagtttaactcaattctgacactaactgcagtgagtgcagaccctgaggtttaagggctcagtcctaccaggctgccccgacctcagaggccagttgcaggctgaaggttgtcacttgtgcttctgactagctggctatccatgagaagttctcacgatccttcctcaggtagattacaagctgtgtaactttgtctaactttgtgctgtaagtcagagattgacttcttggggtcactgttttgttagcatagctcacggaactcagggagacacttaattccatttaccagtttattataaagggtattacaaaggatacagttgaatgaatacatacagccaggtgaagagatggctagggagggtcttggagctttcatgtcctctccgggcgccactctcccagcgtctccatgtgttcagctatccagaagccctccagacccgctcctttgggtttttatggaggcctcattacaaaggcatgattgatcaaaccattggccatcggtgattgagtcaacctcctgcccctctttgctccctggaaacagggtcagggggtgtgtatgggtggagtagggagaaaggggctgaaagttccaactctctaatcacttgcttggttcccctggcaaccagccccctccagaggcaatctgggagccctcagtcgtcaatcatctcattagcatacaaaaaggctctttatcactttgtacattccaaggggttttctttctttcttttttaaatttgagacagggtcttgctccgtcacccaggctggagtgcagtggcatgatcatggctcactgcagccttgaccccttgggctcaagcgatcctccagatcctcccgcctcagcctaccaaagtgctgggattacaggtgcatgcccccatgcccagccaattgcaaggattttaagaactatgtgccaggaagcagagacaagaccaaatatatatttcttattataaatcacaatatcacaccttcctcatgattcacacttcaggtcacttactcactgtgtaactctgtgcaagttccctaacctctctgtgccccagttcccttatctgtaaaattcgctaaattccaggaagggccagccacactggtaggcctatgcggtgcggtggccgatgggggacagacgacacacagaggcagaagccaaagaacacgggtttaaaaacaaggggttaagagcaagagctttgattcagacgaacctggagtccagcctcactttcgttgttttacttatatgttattgggcaagttaccaaatctccctaagtctgtattccttcagccaaataatgggatgacaatctgtttcactggatgattgtgaggtttaaatgtggtcatgcatcaaagttccttatacagcactcagtgcacagcaaatattcagtgaatattaattattttattatgactgctaccagcatctaacgacagtcctaaataccatctaagtttaccaaatgtctctctgatttactggtgacattggataaaggaaatgctaagagaatgcagtgcagtggaaagaagggcgggctggacatcagcgttctggtctccatccgggactggccagcaggtggctctggaaaagggagtccctcagggtcacggttttctatctgtcctgaggcatgatcttcaaagtccattctagcttctgtctatgactttagatctgacagaaatctccccggaggaactcatgagccgtaagttaaacatggtttgaaatcacccttgagctccttgctgatcatgcttatccatgttgaaggctcatccaggaataatagatgggtcttgtgtgtggtttgaaaagttcacttctggccaggtgcagtggtgaaccctgtaatgccagcactttgggaggccaaggtggaaggatcgcttgaggccaaaagttcaagaccagcctgggcaacatagttagactttgtctctaaaaaataaaaataaaaattagctgggcatggtggtacacacctgtggtctcagctactcaggaggctgaggcggtaggatcacttgagcctgggaggtggaagctgcagtgagctatgattgtgccagtccactccagcctgggcaagaccttgtctcaaaaggaaagtacactttttattttcacaggaggtaatgatacattcaagttggttactttacacaagaagaaatttgtgtaatttcttacacaaagaaattacacaattttagataaatttatctttatctaaaattataataaataattttattatttaataaacaataaataaatctaaaactcatttatgtaaaatttgtcactatctaaaattttcatagtaaattgtatggaaaatataatatcccgtagatgtgtcaagaccagaacataggtcaaacagagctgaactcgagtctcaggtctgctggttgactgctagtgaccttgggcaagtcacttaccctctccagttcttgttttcctcacctgaaaatgggaacgatattgtctgccttatcgggctatgatgagaatggaaagctagaacatgtagactgccctccatagtgcttggcatggggtcgttccttttccctcccagatggaacactgcatccatcccgatggaggtttctagatgatgctccagaggattccaagcagagaacatttacaatttccatacattacaaaagtgtgagcctgcaaggcaaggtctggagctgggagcacatctggagcagtgggtgggtactgagaaccatatccacacacacaaagaaatgtgttcgttcagaagatccagcatcaattccttcttcctaagatttgacaagactggagtcatttcttcaccaggcccattttatgaaaaaccctgggaaaactgaggtccagcagccaaagatctaacacagcggaatcaggaaaaatggtggacaggcccctgaaggcacgtaaggagcagggagcctggtgaccttggtgcacccaatgcctccctaactagagtaatggaacaccaatgtggtttacattcataatcccttgcatttgagaatttttaaatctacttaaattttcaaacaagggacactcacaccacctcccacacttattagcatgctgttttatcactccgatatgttcaagggacccacccccataaaagatggaagatgaatcagaaaactcaactggaattgcactccctagaggggccctgggagttgtttagatatgcatagtctcacctcaaggcacatgctgggtacaagatcccttatcacacctccagtcctgctcagctttttaagggagcatttcctgatatataggtctttaactaccaggtgtatttgcccactgtccacctgtgccttcaagtaccgtacttaacaagttggaaccgagggaatggtacacttcacattttgcaactgttatgcaaatagaacttcaatgaaattcctcaaactgttgactctagaaaccgtgggagacaaagggtcagtgtctgacttcacgaacgttaccaacttgaaaaatgagatctattccttagtgtgtgggaggaagacatttaaatctgtagtaccctcaaagcctcactctaaacctggtctggcacttttcaatgtgtgttctttgatatggtaagtagttaagtatatcccaccagagaccttccaaggatgggttttttcctccatatgacttctctcactctttgcaggagaataaaatagagtttcaactgaactttaaagctgtaacctgatctcagaatcatgcaccataaacagcatttgtgcttttcaagatactttcaaatccatatagttttccaagatattcctagttgccacattgggtgatttaattttttttttttttttttttttttgagatggagtctcactctgttgcccaggctggagagcagtggcgagatctcggctcactgcaactttcacctcccaggttcaagcgattcttctgcctcagcctcccaagtagctgggattacagacacctgctaccacgcatggctaatttttgtatttttaggagagacagggttttgccacattggccaggccggtctcaaactcctgacctcaggtgatctgcctgccttgacctcccaaagtaatgggatttcgggtgtgatccaccgtgcctgggctgggtgacttaattttaaatgtagggacatcaagcaaaatgttgctgaggagtctctttcgcagcaaaagtcctgtgaaatctgcaaggccatctttttcatgggtccccaaatgtttcacaggcaactgggcaataattgcatttccaggaatgccaaatggagccaaatccttttaatagctcactgacatgcaggttattccactggggaccaaaaggaaggaactagagctctcaaaatatttgattcttgatttgtgctcttcactggatgattctattttcttgagagcatttttaacgaaacagcagcaatcagtgatttcttagaaatgtggcccctttaaatacacttcagtgaggctagctcttgtgtttcctggacactctgtgtgttctggacatactggaggcacagcataaatattaatgctggccattacaaaaagaaaatgaaaagaccccataaggcagcagtgaccctagaagccccagaagccgtgttggaactgtgacaaggaaggatagtgacaagatctgaaaaaagcagccctcttcccacactcaacacatgcagtaaacccagacatgcagggcaccattgtctgagctgtcactggagggctgggaggagacaggggatggggcaatggcagcctacccacccctcctcatcactgtccaggggcattcaggaaacacaggcttccaatatgaggctgcctttttttctcacaagccatgctcactaggaatccatagcggccatctgcacaccgacctggtggtgtctcaagcttccaggtgtggttttgggggcagggtccttgaggaagggggtgctgctgacagtgaggtaacctgaggtcagctctggacagggctgggtggaagaagagtgtagtgactgctgatccctgtcctttctaggaattggggttactgggtcagagaaacatctcaataccttccaggcttccaaggctggttgtaaacctgctccttgataaaagaaactacatccaacctttaggagcaaggtggggtaacatgggagcagatcttagttcatttgtttgtttgtttttgcttgcctgcttgcttttttgttttttctttttctttttttttttttttttgagacagggttgcacactgttgcccaggttggagtgcagtggtgcaatcatggctcactgcagccttcacctcccagacaggtgattctcccaccttagcctcccaagtacctgggactacaggcatgcaccaccatgcctggctaattattttttatttttttgtagatatgggattttaccatgttgcctgggctagtctctgaactcctgggcccaaatactctgcccacctgggcctcccaaagtgcgggattacaggcatgaaccacctcacccagcctacaaattcttatatgacaatttgaatctctgcttggatttgttttatcctctcttgtgcttgtaactcaaactttaatacttgaaaagtttcatcaaaatttaaatatacttttctaaatctgtgagaaggctgtctcccaagatggtttgttactgcacatcttttccccggtagatggaaatatcccttctctattctctttcccttagtctttcaaaaactcagtgaggaggaagtgcttgcttctagcttctggcggtaggctacatttcccagcctgtcagaatggcctctctgcaggcttcaacccttatgagaaataaagctgtcctttagcaaagtcatcaagctaagtgtctgtcaacagatgatgattaaagtgtggtacatatacaccatggaatactactcagccataaaaagaatgaaatcatgcctttggcagcagcatggatgaacctggaggccattatcctaagtgaaatgagtcagaaacagaaagccaaaaactgcatgttctcagttataagtgggaggtacacagtgggtatatgtggacatagagagtggaataataggcattggaggctccaaaaggtgggaagatggaaggggataaaggatgaaatattgcctattggatataatgtacattactcagatgatgagtacactaaaagcccagacttcaccattacgcaatatttccatgtaagaaagctgcactcgtggtggtgtatgcctgtggtcccagctattcaggaggctgaggagagagaattgcttgagcctgagagttcgaggcagtgagctgtgattgcaccactgcagtccagcctgggcaacgaagtgagactctgtctctaggaaaaaaagaaaaagaaagaaaaagaaaagaggtggatgcagactggagatttaggaaagccttttcagctcctttctcttgccaagtcttgtttgtggctttggtgggtggttttgtttgggggcctgtcttctttattcccttttcttttttctcttaatcaaagcagtctgttctggtactgcagtgaaacaactctttccagttcctttgcatggtggttgtgcacgtagcctccaggcctgggcttgcatcagtcattttgtctattcatacaaagggaaatttaggctttgttcagttcatctcctaccagggcatgtactttcacagctactgcctgggaagctttgtgtgcatgagatatcaccagtctgccaggctaccaacttgactgtaagtggagagactaactgatgaagcaatgactgtgtgccaggaactgttctaagtgctttatgtgtatgagccagtcagcccactattactgttcttctccattttcaggtgaggaaactgaggctcagattgttgagaaaattgtcccaagccgcacagctggtcaggggcaggccagcattcagtttccagagcctgtgtttttaaccattatgtgatgcctccagggtacattatattcttttgcatgaatgtgcaaaaatatgtcttcatgcttctatttctgttcatttaacttgtttcaatttttttctatcacaaataatacagcaatgaatgtttttgcaataatagcttataatgatagttaacatttgtcgaatcgctaacaaagtgatgggctctgtttcaagttctttatgcatcttaattaatttaatctttgtagcaatcccactattattttttacttatttatttattttttgagacagagtctcgctctgtcgcccaggctggagtgcagtggcacgattttggctcactgcaacctctgcctcccgagttcaagcaattctcctgcctcagccttccaagtagctgggattacaggtgcatgccaccatggctggctgacttttgtatttttagtagagacgggtttcaccatgttagccagctggtcttgaactcctgacctcaggtgatccacccgcctcggcctcccaaagtgctgggattacaggtgtgaaccactgtgcctggcaaatcctactattattactatttaacgaatttaatctttgtaacaaacctactattattaccatttaacagaagagggaaacgaggcacaggacagttggctacatattttgttccagattgcacaattagaaagtggcagcttagcaccataagacatagtgaggaaaaaagaaaaaaaaaaagtggatgggctggcattgaaacccagagctggtactcttatgatagtgtctagacaatatctgtgaccacacctctgattgtacctcaagaagaaagatttttaaagtgaaattactagagcataagatataaacatttaaaaggtttttgatacatcttacaaaagtgcttttcaataacactgattgatcatgctcatttgcatttccatgagcactgtgtaattgatcaaggactctaaaagttagataagccactgataaatggagatgcccctctaagtccctgggcagtaaaacctgaccagcatagcctccaataacctgcatagtgttgaggagagcttggatttaagagattaagagggtcaaactcttttctgtccattttaaaatgcaagttttatttaagaggaactatctaatatgctgaagacagtatcaggtatctgtaaaattgctttttgtaactcagaatcttggaacaaaagaaacaataaagaaaatttggaaccagaactgtttaccctacggaaaatttttgtccaaagcagcctctcagcgttccacatcattttcatcattatgaataacgacaacagcaactaaggtttatgttgcacttttgactgaacacatgcctctttcgtatttcttagaccaagccagtgtttcttgtactttcctgatgataagaagtaccaagaggtgttgttagctagatcgtcataaataatcaggcctcccctaggtaagttctgatttaggaggtctgggttggagccttaaatctgtgttttgacaagcatactaggtgttttttattttctgaggattttggaaactactagaaaacacaataaaattgctgtagtaggttcttttttcaatgttaagctattaacattagaatgcttgcttttaattggaatcaggtgttaaagagaaaatctacaacgatcagtcattgcaacagaagtaacaattatatactagcctcacttagcattcttcacccacactggttccctaaatgtacatttcttaattctcttgaatgtctattatacaggcagatgcaacttgcaaatcacactaactcgaacatacacttcagtgcctcactagaacccctaactgacatctttttcctaagtcagtatacctggcatatgcctggctaaagtgccactttctcttgtttagaccctgaagctgatgtagactgggaactgattactgagatctagacatacctcctcctctcctccacataggcccacccaccaagaatccctacattggaaacccttggggttcaaggatcatgagtctggggcatgcaccctgggatcactgttcagagctgaaaatgcatttccccatggaaacattgatgttgatgtggtgccgttttgctagagtccaagtacattttctggtttttgtgggctgatctgggctcttgctgccatttatcatatttctataaaaaaaaaagctcaaaactacattagggaggggtgcatctggagtgtttgaaatatcccaattcttgttctggatggtgtttttaccctgttactatccctttgtgatattccgttgagctgttgccttaggatttgtgcacttctctgtttttgaattatatttattaaaaatttcaacatatgggggtttgcaagaaaaaaggtttcttaaataaaacccctccatatggaatatagccttttggaaattaaaaacaggcattgaaatctatgattaatataaagaataagaaaataaatcaattatcattttttttcacactgtggatagaagatttcaaaagaaaccctttcatggttccttttatttgttttttcatctgtaatttgagaattaaacattcagtcacactagtcccaagcaatacagttcaaaaaacttttttgcctgtttttatttttttgttgttggtttatgcaaatgaggtttttagctggaaacttcaaaagcctgacacatattaaaaataagcagatttatgatgagtgggatttttggcaagcaattgagaaaaatcaccaagactccaaagagagttgttctctttctgtcttggctttgtcatgtgctctttcttaatatttggtttgaagcagtgtatggttctgtaatgtgacctggagcctctattgagtaagcatccctggagactaagaaacatctttctatgctaatggattagtcaaagaagatcaatgtatcatcatttcaagaaaatattacaagaaagtatgctcttactctaatggaagccagtagcaattttcttgtcaatttcccagctattttttaatattattttagtacttactttcctgtgctgactctatgttcaatctaaaattaattgtttgtcccagttcacttccttagtccctagactccagttgcaactttcatgatattctgttcctctcctgcagagggtttaaagggctgcagaataagagggcagcttgtacattcttttgacaaaaggaggcatgtctctcaatgcttcccttagtttctatccccagaagttctcaagatgaatgtccaagtccatttgtgctactataacaaaatgcctgaggctggcgaatttatagacaatagaaatttatttttagttctggaggctggaaagttcaagagcaaggcaccaggaggtttggtgtctgctgagggctgctctctgattccaaggtggtgccgtgagcgtctttacattgtgaaggggatggaaggacaaaagggcttgctagttccctcaagtccttttataaaggcattaatccgttcatgaaaggggagccctcatgatctaaacacttcctaaaggcaccaacctcttaatactatcacattggcagttaagtttcaacatacaaagttggaggcacacattcaggccacagcaatgagattctgtgagttctttgatttagatgaactttgtttagatgaacttttatttctccccaacatcttaccatgagcacagtcaatacaactgaaaattaagctttgattttcctttcaaagtggctctttttttctgctcatgtttctgttaaatgacatgattttattttttaatttgtaaaatgttttggggtttctgctaattgaattatgggaccctagacataaagaagacataaactccccacggagtatacagggtaataagcagatgaggtatctgtacatgtacagataacccaagtacccaggaggctggaagtgctgtcactgaaatacaaagtatatgggattcagagaaagaggtcattctcatccatgggtaccagttgaaattcgtcaggaacaggcaagatttggacaggggaagatgaagaaaaggccaccccagactcagcaggaacagacacttcaaaggcaagaaagtgcaggtcagttgaaactgagggagtcagtgcaagaattgctgtgaagtttaattttacagcataggaggaagttaagttctaaaaccagcacttaaaaaagagagtcatagtgactcagtgatgcttgacaatctgaacatactgcctctcagtaattctcacaccaccaagatgtccttccagtgttgcaacaaatcatgatttctttgattgatcaccagatgaagcagttggctatgtttagaggctatgttggagagcagggagagacagagaataaggataagaatttatttttagaaagtaaatcacacttaccatggcaggatgttcacacagtcatagccacaggggaaccaagattgagaaaatttcagattttctccaagttctccaaagaaaaatgtacaaagatcatgaataggcaatttaaaggaaatagtaatggttaatgatcatatgtaaaatgttcaacatcaccaatgatcccataaatctaaatttcagaaggaagttattattttcttcctatcatttgcaaatatttaaaaataacactgctggtgaatatgtgtatcttaatttcatgcattgctaatgagaatgtaaattggtaccacctttgtaaaaagcagttgcgtacaagaaaaaatagagactataaatggtaatataatttattcacctattcaattgtaaatatttattaagcatattgtatgtctggcaatggatttatctgtaggcagtggatctgtaaatgatttctattttatgtcttgctctgtcacccaggctggagtgcagtggtgcaatcacagctcactgcagccttttgctcctgggctcaagcaatctacccacctcagcctcccaagtagcagggactacaggcatgcaccaccacactcagctaattattttattctttttgtagagacagggtctctctacgttgcccagggtggcctcccattcttgagctcaagtgatcctcccaccttggtctcccaaagtgctgggattcaggtgtgagccactgtgcccgatctattttattctttatacttttatgggttttccaaattttctagaatatttaattgcctcttatcaaaaacatgcattttaatacatcctttccatcttttaggtcccaagtcaagtctacaagtctaccctttccgtatagtatttcctgggctttaggaagtgctctctcatttttctgtgacccttccaaatgagtcttttcatatatggtcttgagttgtagccacttgtatgtatgactttcttcccaactagtaagggagttactgaagagtaaggattgtggtgtagaaattgtaaatttttaggcaaaagactagttctccttccctaccttctccaggaagccttttctactactcaaagaagaaaaaaaaggtgattacttcttccctgaattctcaaaacagttttttatgcctctattatggagagtaaaacaccccgctttgctttggattacagatgattgtccttgtcctgaccccccccattctgctttggattatagttaattgtgtttatcttaaccatagcacccattagtcatccaactccttactataggaaacgaatctcatatctctgtgtgcccagggtagtgttttacataaggtgtgtgctcagtaaacattggttgatcttatgacagaatgaaactggctctttccagctatttcaaagaggtgcatttcagttagtctggaatccaaagtttcagagtgccatgcaagaagcagacccaactgttgaggagtggcagtcataaagcccgatccgccagaaaaaaacctaccaggaaatgaattcaccttagacttctgatccctcaaataatactacttagtgcctttatgggtcctgagaactttatctgtgaagccctaccttctttgaccatctcacaaacttctaaaaattattttgcaaaagaattccaccttttcattcctaaattgaacaccacagatttgccctgaaacccagtttcaggccctcatcttccacatgtggccattgagagaaaagtttaaaatcaaggactgcataaatattattttagaattttaaaaatgggcctagaacggtagcttacgcctgtaactcaacactttaggaggccaagatgggtggatcacttgagctcaggagttcaagaccagcctgggaaacaaagtaagaccctgtctccctgaaaaatataaaaattagccaagtgaggtggcacatgcctctggtcccagctactcggcaggctgaggtgggaggatggcttgagcttgggaggcagaggttgcagtgagccgaggttgtgccactgcaccctagcttcggtgacagagtcagatcctgtctcgaaaaaataaaaataaataaaatgagtaaaataaaataaaatgaaggaaatagagcacaagattcatttccatttaatacacatttattgtaatccaggattttgcaaagccctgtcctgggcactaaggatgatccagagattaaataggacgttgatctcataagatcccatgtggctatggcaatgtaattgaggaaagggaggaacagtgtaaaaggagttaagagacggggagttcattgcccttgactgcagggttttgagccagaattgggttagaagtgggaaataaataggaaggccactggtaactgctcataattgtgttggtggtgactgctgatgctttgagtctgtgcccagtaaatataagacgtaggtgggattcagatagaatgagaaaagctttaggaaaaaaaaaatcaaagttctaaggcaatattggatagaagatatgatgagagacaggttgttatagaaaaggatggcatttaacaggacacagtgcatctgtgagtgttcttagcttctgacaacagactaactctagttagtctgaaagtaaaagaaatgtattaaagactattaggacaccatcaagaaagtgaaaggacagcccgtagaataagaacaaatattttcaaagcacacatctgataaggaactcacatccagaatgtgagaactcaacaataaaagacaagtttaaaaggacaatttaaaatgggcaaatagtgttggttttgcaacaatgtaaatgtactgttcacagtatatatacattttgatgtaacaaatagtaagttttgttatatatatttaaccctaattttaaaaataaatttttttaaatgggcaaacatttcagtaggcatttctacaaggaagatacccaaatggtcaacaagcacatgaaaagatacttaacattatttgtcattagggaaatgcaaagcaaaaccataatgaaataccacttcacacccaccaagaaattgaaaccctcatacattacttgtggtagtgtaaaatggtgtaactgctttggaaaacagtctggcagttcctcaaaatgttaaacatagaattagcgtatgacccagtgatttcactcctaggtaaatacccaagagaaatgaaaatatatgtcaactcaaaaacttgcattcaaatgttcatagcagcattatttatactagccaccagtggaaacgatccaaatgtctatcaaatgttaaacagataagcaaaatgtggtgtatttatataatataacattctttggcaataaaaagtcatgaagtactgacacatgctacgtggattcctgagtaaactgaaaaaattttgctgagtgaaagaagccagacacaaaagcccacacatattatatgatttcatttatatgaaatgtccaagtgtggcggtgtgcctataatcccaattactggggaggctgagatgtgaagatcgcttgagcccaggaagtcaaggctgcagtgagccatgtttgtgacactgcactccagtctggacaacagaacgagaccctgtctcaaaacaaacaaacaaaaaaaccaaacaaatgcagcctcctctgggaggcctttcttcgtttcctgcttctatgttcctataaccctctgtccatacacttctatcatttcatagtgttttgaaattgtaggtcgtccctccccaccttcccctctgccccccaaagaagataaggcccttgaaagtagactcatgctttttcaagctttgtattctcagccttgtgacagatgaaggaagggaggaaggtaaggaaggaaggatggagggaggaaggaaggaaggaaagaagaaaagaaggaaggaaagagtgaggaagggagggagggaggaaataaggaaggaaggaaagaagaaaaggaaggaaagagcgaggaaggaagggagggagggaggaaatgaaggaaggaaggaaagcgcgaggaaagaagagagagaggaaggaagggaaggaggaaggaaggaaggagggaggaaggaagggagggagggagagggagaaaaggaacgaaagagtgaggaaggaaggaaagagggaggaagggaggaaggaaggaagggagagaggaaggaaggaaagaaggaaggaaagagcaaggaaggaaggaaagagcgaggaagggagggaggaaggaaggaaggaaagaaagagagagagaggaagggtccctactccaacttcttttacggagtaaaaaggcctaaagagacagtcatgacttatcatttgcaggactgattgtatcatacttgactcatttgttaacattcacttgaaggaaacgcagagattttttttcttcgctcacattcaggagctgtgcttgcttataatgaactgtcatgatggaggccggcccgtttcagctctctcagccccgtcaagctgaactcacttcccctgaaaggacagtgtttgcatttgtgtttacgggactggggaagaggatgcgttttcaggagacctgaaaaccgagccaacccccttttcctgccccgctgtgctgcgattggcccatcttggaggctggctgcaggagcctttagtcatcgcacagggaaatctttctggaaccgggcaccaacttgcgtgtttgttttcatgctctttgtgcggggattagctgtcgtgccgggcctgaaaatgctgcgagcgccgggcgacatctaatccaggatttgcctctgcctcgcggttgatggaaaacagatgtcttactgctctgggcctgagcacagaatggaaatgaccgaccagagagccatttggagccgaggacacccggtgaaagccattcagagtccagccaggaggccgactttcctcctctggtctgtttttactacttgagccgctcgctcagaaaacggccttagataaagcagtttcaccttcagatcgcctgaggctgcagaagggcggctgcgggggaggaaggaggaggcggagaggagcgggtgcgaagtcctgggtcgcctgcccgctgcctgatgtcgtgagctagggcacctcggccctggctgggcgcgcagcgaggcccaggcccgaggggtgaggcccaggccactccggagcgcgcgctgttcccgcgaagcgagtcgccgtctcgtagtaagtcgtggctcgggctgtgccctgggaaccctcccgcccgggcaaggtccggtggccggagcgtgcgggaagcctgcccagagtccatttccggacgggcgctgcggggctggcagccggcctggagcgggtgcagtgggtcggcgcggcgcagagctgtcagcaacagggccgctgagcagcagaacctggacgccgcgcggctcccaggccctgcccgcggagctctcccgggagtcgcggacctctgccgtcctcagtcacccgcgtcatgcaggatagctttcaaagtcattttgcagagaaaaaaagatactgagcaatctgaaagcaggactgtagtaattttgaaaagatcggcttcctctttttctttaaaaacatgtttggtcattttcctaaaactactttccttcctttagcctcctcttttattctttgccccagctcgtactacagttcgggcttattagagcagggagatggtgacttttgagggtttgcagggctctttctggttggtgtatgtattctgaaaatacttgcccggtgttgaaagctgcatgccgctgacaaagtagataaaaagctgggagtgtggaggacggttcgtctcactaaatgcctgtcagatccaaagcattctgtgaaccccaaattcgttccgacctgtaatccaaccccatggagcaactgatgccttccaccaggcccctttgctttcccgggaaatcaccagctttaatttatggaacagagacagctttagattcaaagacttttaaagagttaattttagagcacttagaattccagccatccaaagattaggctagccccttagggtgtgaggggttgttcttgcagcagtatgcacatctatgccttttttcattgttttcttctaaaaatggagattaaattttacatcaatatttttagaatgtagttaagagttgttgcctgacaacttgtattgagggttcctttcccagggggtgggaggaggtattgtgctgggtccactgcttcccagctccacgtgacctttcctctcaaatttccacttgatttcatctttggcagaactggtacctgcccttcagctccaagaaacaaaagagcaggggtgagtcagaaggctttgactacctcacccttaactagagatagaaagtacttgattaaattctttgtgatacacattgcatttccttccctttccaacttaggttcatataacaatgaaggatcaattaaaatgaactccacctcccttctcccttagggtaaatatggattcccttagggctgagttgggcagggccatctacactaatgaaaagtcttctaggtgaggtaatctggcctgttctgggctaggtacagaacaccacatcccatttgccctcattaactcattcttttaactcattcttttcctggcagcctcccttttctttctatccttttctgtataatcccatttagctacccaccataactctactttggatcatggaatctaggataccatcactgacaaggtttgtttagatgactgtctcttatcagtattccctgagaacatttttccaattcctgcctttattttcctggaaaattctatgtcgattaaatcctccactagaaattccattgtatctgtcaaaaataagcatcacactcacatcttgaatatttttcttgcatcatcattttaatgctgacttgcacagcttcctgatttctacttcaaatttaaatacaaatggaaggaagttgttataagacactaaatataaatgggttagatagtctcagtgagaattaacatcttattctctgaccttttctttagtctgtccttgggttgaattctatcctttcaatttctgaccattgactactctagaaagaggttggatagttattttgtgtgtcaggaatgatctgtttacttggccttttctgagcagcagttactcactacctctcctagtgctgattggtaagaatttggcctattcaatgatgataactcaacggggtaatatagcaaggccctaggaagctttgaaaatgacatcttgaagccctgaaatcctggtgcaataacattatcagaactttctccttctttcaccactccatgaaaaatgacactgcttggtttatatcaaatatgtcttagattataaattcccaaagacagctttagcttgatttgtacaggtactaaaagtttatgctggcgggtcagcacctggcaaatgcttttgatgctgctactaatgatgaagacaggaacaatgatggttttcctttttggtttcttgagaaaagacttcctgcttagaatgtctgtttgagaggctattctgtgaatgttatcttaaaaggcttgaggcaaaggctggcataatatcatacttagtcccaacattatttcttatacttttacattttagaccttcagcctgacctgttagttggcatgtctgaaaaagtccacctatgagtttaatttagtattttctctggaagaaaatgacaggtcttttgaaatgggtagtatttggtttaagggttaaaagaattggcaagtgcaacctttgagataaataggtagagaggaaattaaggggagtgaatttcatgaccttgagccactatttactagacactcagcttttatgtatggttagagggtttactggaaattaaatctcagaaagtgagcttttgttggcaaatattttgtattactaatatagttatttcctatgtaacgctatattatttttgcatatcctgcctttggttgtttgtggttttacttttttaatttttttagagactttgtcacccaaacttcagtgcagtggcacaatcatggttcacagcatcttccaactcctgggctcaagctattctcccacctcagcctcccgagtagctgggactacaggcatgtgccaccacacccgactaatttttaaattttttgtagagacagtggctcactgtgttgcccaagctgtccttgagctcctggcctcaagcaatcctcctgctttggcctcccaaagtgctggaattataggctcgagccactgtgcctggcctatgtcctgcctttgaatctcatcttaatccttgaacagaaatattctctccctagaattttcaatattttcctttttcataatatactgtatatgtagatgaaatttgtctatgcagaagggctggcccaagagactaaaatgtgttcttgagtctaaaataaataccatatatgtcagcatctttattaatttaagactgtttagaagtgctcaaatagaagctgtggatacaggttttgcttctgtcttaactgcagtaaaacgaactaacctaagacatgctgacttctggaacaagggcaatttgtagaaatatgctgcaggcagttggagttttgagagatgaatacccttttaaactgacatctcttcagtgtaagtgtttttcaggtttcagaatgtctgctgtttgagggacgccttttttagtttaatgcagtcattggtccaacctaaaatattaagagaggcacagagttgctgacctacttatctcccattaggatgaggactagcgttttagtactctcattgctgaccttcggggatgatgactttgaggaccaggaagcaaacaaattggaaagcctctcagattaagactcctgaaaagagagatctaagaccaaaaatgtgaaagattagaacaagtttccttttagaatgttctgcccaatcaggtagaagaaaggaaagataattttcaagcccatgccccagtctgctagccaacaaggatttattgagcaaatactatgttctgagccccctgcttatgatctggaaagtacaatagcctaaaaggcaaagaacaagtcttgaaggaattttcaagtcctggtggtacctttaggcattagtgagcatccttctccctcctgttctctgagctcctcaagtctttcctcagtgaggaaatcagctctggctgtggtagaaccctctgcagtggttcagctacaaacactttctgagagaatcaagttggccccaacctaaaatttgtttcctttggcagtgaaaggtgtgttggtaaaaggctctttcagcattacctggatgaagtggcatttgctacttaaccccaagactcttgttcagtgcacggttctattcctaaaatgtcctctcctcagctaccagacaattcaacagtggccctgggtagcgccaaaataacccatcatagaaacactgcttgagagtgaatagtagataggcttgagctttgccttaattaagaggatgagatcgggtctctttaatcgccaaaatagcctctcagactacacaaagacagaactgtctcttttgctgactacatgcaatttatttaaattagtgttgcacattcaacgatggtgtggaagctatattagaaaaccaccaaattgaatgagttttctaggtctttggttagggataaaaagggcattagccacattgaatgggatttgcatctcgttagcttgcccgtatgtcctcagctattggacacaatggagggtgcacgtctctcttttcagctgggtagtctgcttcagttgtgattctcctgggaattaaaattgtgaactagagtcatggtgggggaaggggaagggctggaacttgtctgaccacaccctcccccgctttttgtagttcaagattataatagtttgccttagcagcagcaaaatctatctcagtgtttagtactctcctcggtattggctgtgaacaatctccttgcagatattgggcagctggctctccttattgttcagcatatgtccagggttccctccaatgcactggattctgcttatggaaggcaaaataattaccatgttagtccaagaaagagattataaaagtgaacctcttatgcgaagtaaacattttggatatccccttatttagcgtgaccagtgagatgtcacccacagaaagtggataaaagggtacccaaatgggctgaaggccacaggatcagctactctctatccataaacacccttgtcaactgtgtggatgcttcatctgacaccctgtccttcctctccttccaagtatgaatcatccttgtcactccatttccttcaccacccaaatcctggccctatacttagtacttcctgagacctctagaacagaagtacccatgggtcctcagccactttaccccatgtgtgggtctgatggctaagatgagctgtcctgaatagctttaaaagtaactccagggagaaaaactaaatgtggctcgctaaaagataacacttaatctatacagtttcgtagagggtattctggatgttcggatctgggttgctgcagaaaacaaatggcaataactgggtatctttagcttctcaatcttagccaataacaaagccagcaatcaaaactcaattcaacagttacagaatatggtctccagactcctgccaccattaaacagaattctttcttacaatgctgctttccatcttataaaaacaatgctttgtccatctgttgtggcacacacgctgtacagcaaatgagccttcaatgataaatgttctcttttgccccaggtcacgcggcagtcatagtcatgtacaatcaagtgaccatttatttagaggaaggatgagcagaggctaactgcagtctttttgctgtttttccctattttctgccttcaagtagcaattagcctttgagtatccttcatccttttccccccacaaatggtgtctcaatctagtaacctcacgtataaagcaaccgatgactgaaggctaaaatccactcagagaccacaaaccacccactaaaacaacaggaaaagatctgggagcctggaaagggaagaggtgggagtgagggtacgtggggccctgtgcaaagtgctggtttttcttgtgacatttactctaaagtctctgcttaagctacagaccttggagaagaaagtatattttactcatttttaacacaatttcattaaaggacaaagaaattcgatttcttagggatttcctctataagcatttttcttgtagtccacatatattgtttcacttaaacaaatattctgaatttttttgtttcgttttgacttgttttgttttgtttgagacagagtctcacactgtcactcaggctggagtgcagtggtgcgatctctgctcactgcaacctccgcctcccgggtttaaacaattatcctgcctcagcctcccaagtagctgggactacaggtcccatgcctggttaatttttgtattttttggtagagacagggttttgccgtgttgcccaggctcgtctcaaattcctgacctcaggtgatccacctgcctcggcctcccaaagtgctgggattacaggcatgagccatcgcacctggccagattctgaatttttaaacagtatctactagaaatcaaattcatttttcttgttaaaaagcctttaaacatcaagaaggggaaataattattaagcatttgcttggaacagttgaagtagtttctgtaatagaaggaagacagatttgccagggtatgaaattctgaatcccatctgcacggaagctggttttcatttgtaatgcagtacaaaatattcttggcatctttggtgcttattgcacacagtatactccatgctaaaactaaatctcgatagaactaaatacatttctttcgttagattttttttctaagcattttctctcgttcaagtcccttggataaatgcattcaccaagtactgccaggtctttctacctctgcagagtttagtcttcaatcttccttattcagccagttcattcagctactatctattgatgggggccgagggggacaggagttcacaggctaacctgagagaagaaggcaaggcacatacacccctgcccgtgtcctagatctgtctttcagtctctaggggcctaggccctggctttctgaattttacacatgatgactgctacggtacttacagcctcaatacgtttgccatccacactatttttttttttttaagagacaaggtcttgctctgctgcccaggctggagtacagtggcttgatcatggctcactgcagcctttgcctccagggctcaagcgatcctcccatctcagcctcctgagtagctggaactgcaggtgcatgccaccatgactggctactttttgtatattttttgcaggacagggttttgacatgctgtccaggctggtctccaactcttgggctcaagcgatctgcctgcctccacctccccaaagtgctggtattacaggcatgagccactgcacccagcccatgttcagtctcaaaaccagtagaattcagttacaaaaacaaaaaacacaccaaacaaacacttgtctcaggcataacatattaccttgttgatttattgtaccacagctggaaatatggggactgtcagtttctcctgagaatctgggatactgcatgccttaagggagattgaggtgacagtatgctatctgtcttttatttatgaagataaccctgttgacccaccaggatatgctttgtagttttctccatccatcctatcaatttttattagttatgaaatttactggcccctgtggcacaaatctagaagaaccagctcacttggttcaagcctataatttcatcaacatagcaggtaactagctgagctcacttggaactgagatcataataatgatttaacctctcatttgagcaaggctttactgtttaaaaatcactttcacagaaataattccatcttatcttgacaatgtccctgagaggtaacatcttagaagcgaggaaactaagtttccaagaagtcaagtgacttttccagtaaagggggagtcaggactcacacctaggatgtctttctcactaaaatacacgctcaagtatacttgattggttgacatatgataaatggatacaagaattgtgggaagctctagaagaaaggatgttttgttgagaaaacaaatctaggaaagtgtctggaaaagtggttttcaatagagattgtttactttaaatttaactctagacccaagaatatcacataggaaaccattagggagtcatgtgaacaagacaatcaagtgtcaactcatatgatacagacattaagtacaatgatggttcagaaaagagagagaacacaataaggtaataaatcaaggataatataattgaggaagagggactaaagttagaacttaaagaatgtgcaagatttagatggaagagggaagtgggaagggcacaatgggcattgggaacaacccaagcaaaggtggagagtcattttccagacagggattaggagccagacacatctgatgggaggagggactgagcaggtctaggcaaggaagtcgtgggcattgaggtgaaataaggaggtggaatcaaagaggatcttcagtgcctattggagaaatacagacttgatgcttaggtgctctaaagggtggcggcatgagggagaatctgctccatgcctctgtcctagcatccggctgtcccacgcttcccttggcttataaatagtgttctgtgtcttcacataatcgtccctccatgcctgtctctgtgtccaaattccccctttttgtaaggacatcagtcatattggattagggcccactctaatgacttcattttaacttgattacctccctaaagacctacactgtacaggttgagcatcccaaatccaaaaatctgaaatgctccaagtccaaaacattttgggtgctgacatgatgctcaaaggaaatgctcattggagcatttcggatttcagtcttttggattgcggatgctcaaccagtcagtatctgcacatattccaaaatatgaaaaaaaaccaaaatccaaaaatacttccggccccaagcattaggataaaagatactcaacttgtagtatttccaaatacagtcacaatctgaggtactgggagacatcaatatatctttttggagggagggggacacaattcaactctaacagccacctttaaagagtcatgagtagccaggcgaggtggctgacgcctgtaatcccagcactttgggaggccgaggcaggcagatggatcgagaccagcctggccaacatggtgaaaccccgtctctactaaaaatacaaaaattagctggtcgtggtggcgcacgcctgtagtcccagctacttggcaggctgaggcagaagaatcgtttgaacctgggaggcagaggttgcagtgagccaagatcatgccactgcgctccagcctggtgacagagtgaggctgcatctcaaaacaataaataaataataaattttcaaaaataaaaaaaattgagtcgtgaccagcacagtgagaggcaaagaggtgttttagtgagagtggactgaccccagcatgcagaatatgctggaaggaagggagggaactagaggccataggttggggcgggggtggagaaaagtagataaaatcaagacacatttcaaaggaagagttgaaaagatttaagtagtagcaatggtaatgtgtcgttaagtctagaacataacagtttacagaacattcccatgtctcctttctcctttgtacctgacttaggggctgagtggtgtcttcagggtttctggccctgggagagaagctccagtgataaggtcagccactccagtgagagtggctagcaaaggcagcagggggagactcagagctgcaggtgctgaattggaggtggtgacagagccgggtggagctgtcccctgggccactggaaacctaagccagctgccccctctctagacatagatttggaagtcaaatgcattccagcagtcatctaatcacaagagtgggtgcggcctctgagtgagtgaatgtaggagaagagcagtggcttgatgttttggcaaattcccggagttagaagattgctaagaataaggataagaagcatttaaagtagaggagaaatggtaaagttctctacttccaaagccaaagaaaaagagtttccagtagaaggtgggaggagaagagggacgactgggagaagactttggtttagctaaaatgaggacatggggaaaagaaagtgccaaagaaaggaaggaaggaagtcagatgataattacagggtggcaggatttagaaaatggtgtggggggtttttattggaaagttgtggggttttctttttgagatattgattactttacttacagtcaaattcaccttttctgatgttcaattctgtgaattttgacaaatgaatatagttctgtaaccatgactactgttgagataggaccaattatatcacccccaaaattctttgttgctgaggtgcttttttgtttttttagaggaaaccaatgtgtatttgaagtcagaaaggaagaaacccatgggaaaggaggagatgatggtgttaaagaggaaagggttgaaggagtgaggcgtggaggtggtagggaggcaggtgggccactgagaatgcttcaattttggtgggaaggaacatttcctctcttcctatgaagtagaaggaaggatggatgcatacattcagggtctatgatatctttttatggttaattccaaaactcctgccagcaaaaccatttcctgctgagagagatgttaaatgttgcattgcataatttctgccacggaggtatgatttcctgttgcaatcactgtttgcaggaattacatgcaaggggagtacaggcaccgggctgctttgctttgggatatgtgcccaaatcctgctctaatgtaataccatagcaattttagaactaacaactttaaaattcttcaaagttaagtgcatctgcatcttttcctgcaccatacagtgagaaagcttggcagcaataatggcttcaatccccataaatactcctgacaggtgtaaatgagtcactgcggaagagctagcttccacagacatgtccttggggcattatttggcagaagagattgaattctcatcattttatgctcaagactcacaaccactcagaagtgcagttttctccttgacatctatgatgttgcttgcatctccctttatccttgcagtcacactgtgattcaggggtgggaggaaagaaggtgttggatagcgattctcaaactgtgggcttcatgagcgggttgtgaatcaagttagtgagttgcagccagtttactgaaaaatgaaatagaataggaaatagcagagggcatcgggctaaatgtgatctcatgcaacctttgtttcagtgaaatatatgtatctattactggactgcaacataaaatacatttctgctgcggatctcagtcacaaaagtttggaaactgaatgtagaagtatgcagatcctttatgaccctaggcaggctactgaatgtccttgtggcttagagtcattgtctgtaaaatgaggctcataagttacctactctgtatggctgttgagagtgttaaacagaaaatgcataggtagcattaggtgctgtgcctggttaacagtcaatgcttgtgatgatgatttgttttcctgcctagatctataggtcaaatttttattcaatgcccagacctttcttctgagcctagaactataactcagcagctatttgacatctccaggcagttgttctacatgcatctccaactcagcatgtccaaagtggaactcaattaattgccactttctctctccaattcttaaccttccccgtgccctgtcccaccctcgagcacacagacccctctgctgcccccagctgtgtacttcatatgtggtgcttccaaactgcttctagttggtcttcctccactaacacacatatgtcttcaggtttcctctgccttgaatgcttgttccacttttttgttgtatgactcactctttcccatccttcagggcttaatacaaattggttttccagtcagaaagatgtaggcttgaagtcactaatcattggtgacagctgtgtgactctgagaagcaaatttctgaagcactcaaagtcagtttgttcctctgtaaaatgggaaaagctgtgcctgcttcatagagttaagataattttttttttttttgagacaaggtcttgctctgttgcccaggttggagtgcagtggcatgatcacggctcactacagccttgacctcccgagctcaaggaattctcctgcctcagcctcccaagtagctgggactacaggcaggcacaaccatgcctgcctaattttttgtatttttcatagagatgaggtttcaccatgttgcccaggctggtctcgaactcctcaacttaagtgatccacctgcctcagcctcccaaagtgctgggattacaggtgtgagccatggtgccccgccaagttaagagaattaaatgaattcttgtgtgtatagaatagtacccagcacatacagagtagttaataaatggctgtgattctttttcatttttaaagaaggctcaattcacctctttctagagcttcttacagacctgaatgtgtcaggttgttgaagagctttgcagttttgcaccagctattccttctgatcagattaccttttccacacttcttcctttgaccaagccctactcctccctcaaggctcaacccaagtgtcacctcctccgggaccctgccaacatcctgtgctcacctccatcagaattcttgaccacctaaactatgattaccttctttccccctagattctaagtctcctgagggctccatgtgacatgtgtcgtgggagggatccggtggggatcaaatcatgggggcagtttcccccatgctgtactcatgattgtgagagagttctcttgagatctgatggttttataagcatctcgcatttctcctgcttgcactcattctccctcctgccaccctgtgaagaggtgccttctgccatgattgtaagtttactgaggccttcccagtcctgcagaactgtgagtcaattaaaccttttttttctttataaattacccagtgtcgggtatttcttcatagcagcatgggaatgcatggatacagttaaggccatccccaacatggcttctattgcatgttctagccttttcttctacttatcctcaccttgtacctcataccatggaaaactaggctccttactccctcactgtgccccatacctcatttccttgtatgcctattcatgctggctctttctgtttagccccacaaacccactaaagccctctcaaatgctaccacatgacaattctagaacctttagtgatctactttttttaaacaaacagtagtagttgtcctcaattctgctttgcatcccacagcaacccactatggacttttcttgtggagaagattgtcctttatacagcagtttctttacatacttgtttttttatggcaagttgtttgagtctgaggattgtgtctttttcttttcttttcttttcttttctttttcctttcttttcttttctcttgagacagggtctcactcttgtcaccttggctggagtgcagtggtacaatcacagctcactgcagcctcgacctcctgggttcaagagatcctcccaactcagcctcctcagtagctgggactataggtgtgtaccaccatacctggctaatttttaaatttttggtagagatgggggtctcactatgttgcctaggcctggtctcaaactcctaggcttaagcaatcctcctgcctgggcctcccaaagtgctcatgtaatatgcatgagccacctcgcacagccagaggattatgtcttaaacatctttgtaaacttacagtatcaaggacattacattgcttgtcttttctcataagtgtttgaggaaacaaatagaattgaaaatcagctagatttggttgtgctttctgcttgctaatttaacttttgggggttggggtgtgggaaattaaggtttaacttgtcttttgactcttaaatatatttcttctacatgcaattggagctggagttgctacatttagcaattaggcatgtaaacattagtaccatattataaccacattgttgtaggcatttttgattaattgattattaatattaattttagtactaatatacctttaatgctattgtttatggctcttagttacttaggagtgtgcatactaataaaaagagtcaagaggccaggagcagtggctcatgcctataatcccagcactttgggaggctgaggtgggcggatcacgaggtcaggagtttgagaccagcctgaccaacatagtgaaaccctgtctctactgaaaatacaaaaaattagccgagggtggtggcaggcacctgtaatcccaactactcaggaggctgaggcaggagaatcacttgaactcaggaggcggaagttgcagtgagctgagattgcgccattgcatttcagcccaggcgacagtgcgagactccgactcaaaaaaaaaagagtcaaaatatatgaaatgtgaaaatgtaaatacataaacacatttatgagtggtagttgtatacatacatactttctactttatcaaagtcaggacatctatgaatggttatacaaatggttatacaaatattatacaaatattacaacttaattgtatctttttttcaaaaaaacagaagatccattggtagtatgctctccagctccctccctctgtgacttacaccttcgctagtcatttgaaagcttctgtgggagtgtgtggtaagtgacctgccattgtggggagtggaagtggcatgacctcaggagccagttctgagtccaggtgaaccaaagctcagtttctttcatctttgaacctgaacctcttacctccaagaaaaagggcccaggaatttgggccttcttgtttatttgtccttctgcccctctccctatctaacccctgggtaagggtgagcttgaaggtgatggtgacagtggcttctgtgtgtgtcagtccaccctccaagcaatgcttagaaaccagtccataagccaattaacacatcatttttagggcagatttgcaagttctcagttgtttacatgtttcgttaagtactaacctccaaattaataaagcatgacacatgacatcacacatttcacaatttgtacccaagcaaagttcatggaggtaaaggtaatgaattagcggttgtgaaaaatcacacattcctttactggagacaggagagacatgtagaatatattggcaatgaccaaaaattgacttctaagtacttttgagattggccctgggaagcatcgtatgaatctctggcaagggaagaaaggactggactccagggagaggaaaagcatgtataaaggtataacggtttaagaaaaagagagaactggaataacccaggattctctggaggcatagaatgagtgcattttaagtcttttaaagaagacttgttgtaaggcaacaagcctggagccaagaaatgtagcaattccagctccagtcgcatgcactagacctgctgtgcttaaatgtcctgtgattgggtcatggaattgcagcatgtccagcacttgaagaggtttggatgctttaagtcactgcaagaggccaggagatggggtcacagagacagaagagacagactgtcttgtacagaaacctaagggctctctattatggactgaatgttcatgaatccccccaaaatcatatgttgaaggcttaaccccactgtgacggtatttggagacggagcctttggaaggtgattagggttagataagatcatgagaggtggctgaggccttgttgacaggattagtgctcagtctccttagttagaaaataactctggcggccgggcgtggtggctcacgcctgtaatcccagcactttgggaggccgaggtgggtggatcacgaggtcagatgatcgagaccatcctggctaacacagcgaaaccccatctctactaaaaatacaaaaaattagccaggcgtcgtggcgggcacctgtagtcccagctactcgggaggctgaggcaggagaatggcgtgaacgcgggaggcagagcttgcagtgagccgagatcgtgccactgcactccagcctaggagacacagcgtgactccgtctcaaaaaaaaaaaaaaaagaactctggctttgatagaattgttttggagattttatcataaagatagtgctctctctctctctctctctctctgcctttctgttattttctttctattcctttctaactaagagagaaagttatcctctatttgtaagtgttaaagaatgcaatcaccatgatactgcttcacatcccctttagtgtaaaagtgccttgtgtctagtaagcagttgcatcatcattgcatgaaagtggaataaatgaatgaatacatgaatgttagaagtaagtggcctgcaccaggttttcttctcgttctgtcttcttctctcttgcctttcttgttctcctttctcttcaacacataacatcttttattaggtatatacatgtctcctttgttcgtctttgccttaataagaaacaacattttcgagcaatatgaaatgtctatgcatgacagcatcctaactttctttctcttttttttttttttttttgtaagatggagtctcgctctgtcacccaggctggagtgcagtggcgttatctgcaacctccgcctcctgggaggcaggctcaagcaattctcctgtctcagcctcccgagtagttgggactgcatccacgcgccacacgcccagctaatttttctatttttagtagagagagggtttcaccatgttgcccaggctggtctcgtactcctgggctcaaacaatccacccgtctcagcctcccaaaatgctgggattacaggcataagccaccacgcctggccagcatcctaactttctgcagcagtaagtaggatccctaataaaggctgaatatcatactcatacccacaattccttacttggtttaaatacaaaagattatcgctgccaaactgtgcataagaattggtagactatgtttgaaaatgttttcctttaataatattgcaaatacctgaagccaggcaataaaagtaagacacaatatcttatttggtagtgttttcttttcaatattgttttcagactcccagttggaaggaagaggttttgtatcacagtttatactacatatttgcataaacagtaaatatttttctcctacttaaaacaaaaatcaaataatgtttagtaattagactaccttcagccactgtgaaaggacttagtttagggtaaatggtgtcttttcctacactgcttctattatcagtagaaggttactacctacgcttctagggctctccagattttaacagctcatgaattcagaatacatgaaaaagcaagagttaactacagaatatttaaacagttgttttaattttattacttccagtatttgcatgtatccaataaccatataaccatgtaaatatattataaagcatacctcaatgactggaggagaatattttcagtaagtatattaaaatcgtttccctggccgggcgtggtggctcacgcctgtaatcccagcactttgggaggccgaagcaggcggatcacaaggtctggagtttgagaccagcctgatcaacatggtgaaaccttgtctctactaaaaatacaaaaattagctgggcgtggtgacgcacagctgtaatcccagctactccggaggctgaggcaggagaatcgcttgaacctgggaggcggaggttgcagtgagccgagattgcgccactgcactccagcctgagtgacagagcgagactccctctcagaaaaacaaacaaacaaaaaaaccttttcctgtagagtatgtgtcactcttaagtaggttaagatgatcttgcttacacctaacagatcccttctacaagagctcaaagggatctttagcagatgtccgatcataacaagtagttctgaggtgtctcacaggagtacctggtctaggaggctgtgttctccagagcagcgttgatcacacagctctggctaatgtctaggcaggctggacacccagtccttcctcatcgcacattgttggaagccatgtgccaagactgcatttgtgctgcaccatcgttgggggatggtcctgccccctccccgatggaggtcacaggtttgtgggcgagacacctctaactaaacaaacaaatattcctttacgaactgtgacaactgccatgaaggattcaaagggggcagagtgatacataacaaaggggcacacccacttaagtcaggagggttaggaaggcctcagagaggaggcagcatttgagcatgtgagcagagaacccaggagcagagaacccagggagcaggagcaacagcagggctaggaggagcgggaaccttgcattaagagcgcctcgttgctcatgaagatccattcatttagccatgaactaaaacaaggcggcctccttttctgaacttatctcagaatttcgacctgaggaaacgggtgcacagattcttgaaaagccagaaacagtacagagagaacggaggagaggccacacgtatgccggataaaggtcccaggatgctgctaggagagcactggccattagagtaaacagaaaaatagaaatgaaacctgtttttataatgaataacttttatagtctaagtttaaatgaagattgggttttcccatttctgggggcaaacaaacatgtgttaatagctaattaaaaatagaatgggaattctactgaggcccattatggaacagggggcaggcaaggtgctggaacatgctggccatctgatgccaaccacgtgggtcctttgaataaatctgtgtgcttttatcacttcaccctgctcaccaatttgaccggattaaaaggcttcataacagtctgcacaactgctaatgatgtaactccgctcttacatgtttattttagtgttggatttttattgttaaggtcactccgaggatatgcggattcttaactacacaaagttggtacttagccttggtctattttgtcttgtatcttttttttttttctttcctattcccaggagtctgccttctctgtgaatccccctctaacaggatgtcgtggtttatttattccctgccctttgccatgtggatgggcggatttttaaccttttagtaccataatcctttgtggtaggttcctgtttctctgctatcttgggaactcctgctgttcgaccttggtgtttgcatatttataaactcttaaccattaactcttcaagcagaccagctgcagcatgagagctatttgctattcctcagcatcgttttctagtctcacttagcaagacctttgcttgttgtattcccatttgtgtctgttgtggaacaggctcgacagaactactgaaattgtaaagaaactcaggcagcctgcacagacctccagctccctgggtctgcctgtaaagagaggacgctggggcagatggagagcagcaggcactcggagttaggcctgagatctgcgaatggctttgccacttgcaggttgtaaggcatggtgggggctgggatcaaatcacctccccagctctctgtttctttgtctatacaatggtgatcaaactggatatctccactgagcaccaggtgtcctgaagagatgggcgggggtggaggcagcatgagtgggaggtgagcatgttggcaggggccccagggcccgggcagctctctagagaaaggatttcatggctttaaaaccacaggactctgtcacctccaaggtcctttccaacttcaaacacacctctgattctatgaaaggatgacagtcttctgccttcctgcttcattactggtggagaggccctgccaaggcaaggagggaagtggactaggaggtaggcctgaggctagggtggagcccccaagcttcctatcagtaccgccaaactgaactgaagccccccacacaattggaaagtgatagagaaggtgatggagtttatgcccttgattcaggttgttgggtttaaaactgaagatccacatgaaggggtgactcttttcgttgagagagtaccagtgctgtgccatgtggcagggcaaagacgaagagcagtgccaggttccttgactgtgggctttgcttcttcatggctagggatggggagcactggatgcagttacatccttgctagatcccagatcctcactttttgcttttgacagaagtctcaggtaatagacttgctttctttcttcagcagatagtagttaaaaccaagtggcaacctgataggcagccagctgttatctatgactcaaactattaaggatggagacatctgtacctgggccatgttcttcccagaggagagcccttactaagtcagagggtattattgtgacatctgaccttgaggacagttcaacatgtcaatcaggctagataagcaaattctttatctagtaaaaatggctaggcatggataatatgtggtttcttattctccttcctcctccccctcctttttttttttccccccccccttgagacaggatctctcattctattgcccagactggagagagagcagtggcacaatcactgcttgctgcagcctcaacctcccgggctcaagtgaccctcctgcctcagcctcccaagtagctgggaccacaggcatgcgccatcacttcctgctaatttctaaatttttttgtagaaatggggtctccctatgttgcccaggctagtctggaaatcctagcttcaagcaatactcttgcctcagcctcccaaagtgctgggattacacacatgagctactgtgccactgccatcttcttcttcttcttcttcttgttcttcttgttcttcttcttcttcttcttcttcttctcctccttcttcttctcctccttttccttctccttcctcttctcctccttcttctcttctccttcctcttctttcctcctcctcctcctcctcctcctcctcctcctcctcctcctcctcctcctcctcctcctcctcctcttcttcttcttcttcttcttcttcttcttcttcctcttcttcttcttcttcttcttcttcttcttcttcttcttcttcttcttcttcttcttcttcttcttcttcttcttcttcttttaattagagaggaggcctcactatgttgcccgagctgatcttgaactcctgggctcaagcaatcctcctgcctcagtctccaaagtagctgagattactggtgtgtaccactgcacctagcaacacatagttttttgaagatgtacaaaaatttgattcttggaatggatttataagaaagctttgcatttcctctgggttgagggaaacaactttattaattgcagtgtctttggaacaggtacatattttaatattattagagaaagaatttctggcctgcaaataattggatatgaactagagaataaatatcttcctacattgcaggagaaagtaaaacataacatcctgtttctatccacagatacttaagagggaaagggagaaggaaaggaaagaatggaattgggaattacatggcataacttgggatacctgttttacagctaaatcatttgtgatctgatttccatgttggtgggacttggcctgtttctggcaggttcctcctgccttccctcattttccccagctttcttcattcatcacaggttcttttttctaccatcttctgtgggtaaaatctagggggcttgtgaccctctgagatggttcttgctgcacgtgtctgtgcacagcactgagaagcaaagtacacacacagtcagttcttgcaccagtcaggagcagcttgcctccacctacaaaacacagggtgatcatgcgtctaaggaactgattatcttttccatttcttatcttctgcacaagccaatggtaagttctgtttacttacttatcttggcttatgcacaagtaaactgtaggtattgtttttcatttacgaggtttttgctatccttgggttggtttataatgttgttagtcagaccaggttgtgtcttaatgtccagacagtgagttagggtattacagacccaccaactggattttcctctgaagcaaaatctactaaaggtgtgtcagccattttgttaggcttgagcaggggcgggcaaactatggcctgtgagccaaatctggcccacggcctgtttttgtacaaccagtgagctaatgatggtttttatgtgtttaaataatttggaaaaaaccaacagaaaaataatattctgtgacatgagaaaattatttcaagtttcagtgtttataaatataattttattgaacacagttataatcattcctttaacaactgttatttatttgtttgtttatatacttatttattttgagacagggtctgtctttgttgcttaggatggcagtgcatggtgcaatcacagctcactgcaacctctcctcccgggttcaagcgatcctcccacctcagcctcccaagtatttgggactacaggtgtgcaccaccatgcacggctagtttctttgtattttttgtagagacagggttttgccatgttgcccaggctggtctcaattttctgagctcaagcaatctgcctgcctcagcctctgaaagtgctgggattacaggcatgaggcaccacacccagcccctttacctactgttaatggctgctctaacactacaataaaattgggcagttgcaacggatactgtattgactcacaagtcaataaagtgtttgctatactggccctttacagaaaaggtttgctgacctctttgcttgtataattaaacagcaacaatagttcacatattttgagtcttcctatgtgccaggcaacgtgctaagcatcttttgggcattgtttaatcctcataacaaccctataaaaagtatctcttttaaaaagtaaaaagtatctcttttactttttacagatgaagaaaaggagggtaagagaggtggtgtaatttggccaaaatcacactgttgggcagtatcagagctgggatttgtacccacatttgtctgattccagagcctggattcttatccaccacagaacaccaacatgcctgtatttcctaggtgggtctgaagtagaggccacagataaaaattgttaattgtctgaagcttaattaacttctatttcaagtaatttaatttagtttattatttgagatttagtatctgtctctgttatgagaatgtgtacattccttaaggatagtgactatctgtggctcctaacacagtgcctagcacatagtagaagctaagttaaaaatctgttgaatgaagtggatagggagtaggaaagagggtgggagaaagggggaggaagaatagaggatgagagacattatcaaggaagagtcagggtgcctagcattggccctaaggtcatggatggctctgcttggcactgggctcaccctgaccaagggctcacaacaccctcgggtcaggcctcacctgaccgtgcacacattccatctgctgctgcttgacttctattcttccgcccttgctcttcccctctgcctctggtggccttgtggcttcctggcactggtccagatgcaatgccaaccttgagaggcgcatcaatgtttgtttagagtgcattcatttggaggaggatgtggaagtgaggcctcccgttctcatgtccagagacgatgacttacatcaaagggcaaaactgacgctggaaggggaccaaaaggaatcatttctcttctgatctttttaagaaggctgctggctctaagggagagatgctggccactgaggactcatttccacaggccgctgaccagcacaaaagtccaggtttctttctcatgagaaccagtggcaggtaggcatgaacagactctcttccttcctgggactggcctgggactagagttagtgtgagacctcagcaagagtaacaaagtagcactgcagcctctcagctgtgtcaaaaacagcagggagacaccagtgctaagtgggtgaggatgcagagggaggctgtgtccagcctggtgtgataaaagtgtttaggcaccaggcgcggtcactcacgcctgtagtcccagcacttcgggaggccgaggcaggcagatcatttaaggtcaggagtttgagatcagcctggccaacatgccaaaaccccgtctctactaaaaatacaaaaaaattagctggacatggtggcacatgcctgtaatcccagctactcaggaggctgaggcaggagaattgcttgcacccaggaggctgaggttgctgtgagctgagatagcgccaccacactccagcctgggaaacagagtgagactctgtctcaaaaaaaaaaaaaaaaaaaaaaaactgtataggcatatctcttctgattttgcatgattctgctcgctatcatttattgatgtattttatttggcttatgaaaaggtgatgaagtgtagtgttttattaaactattcatatgcccaaaaaaaccccacaaatgcttactgaatccttaaatgagcccagctccaggagtaaaaaaagtgaattatcagtcatttctaaaggaactcataaatctagtagtggccataataatgatagtaataatttatgttctgactgcttatgatgcatcaggcattggatcatgtgttttttttttttttttttgagatggagtctcgctctgtcccccaggctggagtgcggtgacacagtctctgctcactggcgcgtccgcctctgggattcaagcgattcttgtgcttcagcctcctgaatagctgggattacaggcgcctgccaccatgcccggctaatttttatacttttaatagagacagggtttcaccatgttggccaggctagtcttgaactcctgagctcaggtgatccacctgtctcagcctcccaaagtgctgagattacaggcgtgagccaccgcacccggcctagatcaggttctttacatagactaaacaaaccatttccttctcctaacaacgctatgtagtcagtacccttgtcatcccccgtacacttgaggtaattgaggaatacaggttaaattacttacccagggttatacaacttgtaagtggcagagccaggatccaaacccattcttggctctagagcccatcctcttctccactaccgcacctgagacttactgtgtgttaggcatggggctgacagtgacacactggatcatttaatcatcacaatggcattaggaggtagcattttacaaacgagctaacagacaggcaaggagcaacctgcagataaagcaaatccagatatgtctccagagcccgtgccttaatcgcagatgcattctgactttcatcataggattctaatcgtggatgaaagtgaccctgagttgtagtgccaggcaggttgcttaggaaaatactcttctggtaacatgttggaggggcagccttctgaggatggtgtcagattcccctgtcctctgattagctccctctgccaaggtgcccaggctcctacttcagtgtcacctccaggtttcaaagcatggaaacccaagcatgttactcggagaaagtcccacccccagcatgggcgcatcggcttagaaccctccagggttagcaggcaaagagctgtggaccccggacacgggaaaaggccacagtcgggagaactcctgttgctggagggccaggcgggggcgatccccagggctcccagcttttaatgctgtcaccgcgggccttactccctcctcttccccacatcgccaccacttgaatcagttcttttacaaagtggttctatttcctggtgagacaaaaaggttagaaaaggaaacctagagggggtgggggaaagacagaggttcggaataccggcgcgcaatcgccatctgggtggaggggacccgccttcttttcttccgcctgagcgcagctcggctcccgcctcggggcggggcctgttgctatggagcccgggccccggcagagcctgcggggtgaaagcccctagggctccgcctggcatgcgtggccggggctgtctgagatttccccaggtcggtggttatgaccgcaggatggaatcgtagaggtcgggtgatttggtcagtagagaggaacatttgcgaggttctctctgaattacatgttggtctaaaagtaatccactatctgggaccgagaggaaagcatgtgtggaagaggcaggcattattagcagcgcgtccgcctcggccacctccctgctcccgcctcggccacctccctgctcccgccccggccctgggggcctctgttcagcctccaccagctcagtcgcccacggagactcccgaactcttaaatcccagccctgtagtcaaaaccactgcattaattaaacaaggtaaactggtgaggcaagcaggaacttgacaccgccttgaatttaattgttaaaatgagaagtgtggtaatggagctctgcttaagagaaaaacaatacttgataccgatgtgcacatcgatgtggacacggatgcaatcaggaacccatagttagcaccgggagattacattccgggtatactcaagatagatagagtcaactttgaattctcgaggccaagcaatgggcgaaacaaaagagctttgtgtttgcgtgcttttgctttttgttacagtcagagcaggacaaagaataatgaaggagtagacatgttattacttgggcatttaataatcagtgcatggcagagccttgtgttttgcttgtctttttttttttcttttcttttcttttttaaagacagggcctcactctgtcacccagactggagtacagaggccccatctcagcttactacaacctcagcttcttgggttcaagtgattctcctgcctcagcctcccaagtagctgggactacaggcacgcgccaccatgcctggctaatttatgtatttttagtagtgacggggttttgccatgttgaccaggctggtctcgagcgcctgatctcaagggatctgcccaccttggcctccaaaagtgctgggattacaggcgtgagccaccacaccaggcctacttcagtcttttctacaaaactacagaactccctatcaagagtaatgctagagaaggaatattaatgggatggtttgttagtacctagaaaaaaaagcatcctgagttccataagaataaatgataccagaccaaccaaaattcctccttggatagggttgctgggcatgaatttatgtccaatatgagtcaatatgagaaaagtgccaggacctcagaggtaattaatagaaggatagagcctggagcaagcaaagtgatggtcttgctctgctctgtgctgggcagatcccacctggatatgtcttcagtttggggcagctccctgtgggaaacatactgggcagggagtcaggggtgcttgacctgggtcacctttactgcaaatacagcccggctgcaaagggctatcctgatccttgagactctgagctgaaggcagataactcagtccccaggagtgattttgagaggttctgtttgtgtcatttatttttttgtcaccagtgccttgtataccacctggcacacaatcacttgtgcaatgtataacattaaagggtcatctgaaggccaggccacttctggtgtgaattcttgggttggaactgggtcagctggttcccaattaatctactcctatccacataaccccaataggttaaggccaacttgcaccttttctcttttaaggatgcttaagagaaagtcctttctgcttcattcaccattacttcctgacagtcctgtttgtccttaaaacctcccccacagccactaatgaatgatcccaacccctaaacataggaggcctcaccagggctactgccagtagagaggaaggggctcggcctcttggggtccaaaccaaaccactcaatcaaactgactacagagagtctggactgtccagaaggagcttggctttgagggccacacctggagtgctgaactgtgaaatccatcataacaatacttcctctccagttgctcatgactgaactgaaggctggaaataattacttcttaccatcttctttcataaaaccattgggcaatacttttcataaagtttttatgtttgtttttctttatatctttaaaatttttttctacttgacatgttaatgaggtacagtgtgatgtttccatatggatgcacattgtgtaataattaaatcagggtacttagcatatgcatcacctcatacctttattatttctttgtagtgagaacattcaaaattctctcttctagctattttgaaatatgcaggccaggtgcagtggctcatgcctgtaatttcaacactttgggaagctgagatgggcatatcacttgagcccaggagttctagaccagcctgggcagcatggcaaaaccctgtctccataaaaaaatacaaaaaattaacttagcatggtggtacacgcctgtagtcccagctactggggagactaaggtgggaggattgcttgagcccaggaggtcgagcagcagtcacgccactgcactcccactccagcttgggcaacagggtgacaccctgtctcaaaaaatacaagttaaaaaatgaaatctacgatacattattgttaactgtagtcactctactgtacaatagaacaccagaacttattccttctatctaactgtagctttatatctgttgactaatctctccctatctgcctcctccaaccccaataaagcttgttgaaatcagagacacagaaaatgaaatgattgcattaggcagcgtttataagctcctgatttgtttgcctcttctagttggttatatctatctcacactgaaacacatcacctctctacttagctggctttgttctactctggagttgcctgattactgttcctgttcttgcacatcctggggcaggtgacatactgaaagaggaacggtgccagccacaagacctggactctagttcacctctattacattatggttactccatcctgggctggtcactttacctttctaaatctcaatttccactaaaataacaatgcctgctctacccgtttctgggttagctttgaggatcaaagagaaaatctatgaaggtactttcttttttctgagatggagtctcactctgtcacccaggctggagtgcagtggcatgatctcggctcactgcaacctctgctgcccaggttcaagattctcctgcctcagcctcctgagtagctgggatcacaggcacctgccactgcacccagctaatttttgtagttttattagtgacggggtttcactatcttggccaggcttgtcttgaactcctgaccttgtgatccacccacttcagcctcccaaagtgctgggattacaggcgtaagccaccactcctggcctatgaaggtaccttctaaatcataaactaccagatatgaagaattgcctatccataacagtctctgatccaactaattctgagatgaactttcacctttatgtcatattatgtcatttgttcattcatagaactttcatcattccctatctacttattgggcacctagtatgtgacaggcactgcactaagggttagtgaattaaaggtaaaagatggaaccttcaacagtttctagcaagaatgctgtggagtacacaggagtggtactcaatccagactgtgggtgggaggatctgggcatcagaggaagactcagagaatccttcctaaagtgagtggtggctttgctgagttctaaaggagcgcaagaagttaaccaggggcaggaggcaggagaggctgagagtgttcctggcagaacaagtggtaagtgagcctagagattagtgtttctcaaaggagatgctactgacattagtgttgtggggacagatgtacttttaacgtactctcccaagcattggagcaggtttggcatccctacacataggcactaaatgttagtagttacccacccccacacacactgggtatgacagccatagtgccccttcacatttccaaatgcacaccctactaccccatgggaggggttggtaccattccttggctgagagccactgctaaaaaaatacatgtggaactgtcagaggtgtttgaacctgagcaactccatcttgaataggagtcaggtaaaatgaggctgaaacctactgggctgcattcccagatggttaagccattctaagtcataggatgagataggacgtcggcacaacatacagaccttgctgataaaacaggttgtagtaaaggagccggcccaaacccaccaaaaccaagatggcctccagagtgacctctggtcctcctcactgttacactcccaccagcgctgcgacagtttacaaatgccatggcaatgtcaggaagttaccctatatgttcgagaaaggggaggcatgaataatccaccccttgtttagcatatcatcaagaaataaccatgtaaatggggaaccagcagccctcagggctgctctgtctatggagtggccattcttttattcctttactttatttataaacttgcttttactttgcactgtggactcgccctgaattccttcttgcaggagatccaagaaccctctcttggggtctggatcgggaccgctttccagtaacagaatgtcttatgaacagagtgtgactagggaggacagaaggtggaaaataatcaggaagcagatgccggattgtaaattactttgtatgccatcctaagatgttcattttctgggataaattttcttgagcagggataggcagactgtatataaagtgcattggattgaacttggcacatcatacagggtcagtaaatactggatcgctatctctcatgctcctgccaatcccaatttagtagcgtacatcctcttcttatgcataggcactgtctgtatacttctccagtgcacaaatcatagtcagactggctgatggcagtttagctctaatctccattcagctggatggaaacagtggggagaggcaagacagctccaagaagtcaataaggtgtgcagtggctgtaatcccaagaatcctgggctcttctctgcccttgagacccccgagtccggccacttgaggccacaatatgggaaactccaactcagaagcataaccagcagccactattaccatctacctacctgttttcaggaagtgccaaggagatgatgcttggcatttccgtgggggcctcccacggttacccaagccccaacttataaacagttggactcatttgccaagacatatgctaaaaatgaggctgcattttcctataataagcaatattatgtgtgtttgttagattcacagctgagcccccaaaacccatttaacccatatagtagttaagccattgtggtgagggtgtttgaaacccagctatcctatgtaatgctatttccaggggaaaaatattcccaattccaggtaaaagatcagaaacagatatcacctgcatttgttccacctttaccccaggcttcagctatacttaggtattactcgctggtcccatgaaccatctcatgcctttgactgtgctgcactcagtgcttgaaatgctccgcacaccccgcacacctccctggccctgtgtatcccttctatgggcgcccagagcatttgcttcctcttgctctcaagcatttaccactctgcattgcaattgcttgcttactaatccatctcccacactagattgtgacctccctgagggctcagaaatattaaattcttctctgtatcctcattgcctactcagtgcttggaacacatgacactcaacaagtcttcattggaatgaatgattgaatgagtaagttaacatcctctggctggaagcccagcaacaagaccaaagatctctcccacttctccaccttcagaaaacagagacctggtctagttataggtctcaagaatctgggttgactggaagaagagaatgagagagatcaggacaaagaatgtgctggggggcggggtcagcatttgatgaatttggctttgggataggcttagtagcagaatgagaagaagaaaggactcctgttgtagtaagtcagacacctgtctgatggcctgtcttaggcttgtaaaactcagtgggggtagcctgcttccagttttagaagtgggtcctaattaaactgtaaacttctaaagcagaacatacgtccgcacaaaaccttgtgcacaaatgtttatagcagcactgttcataatggccaaaaagtggaaacaacccagtgtccatcgactgatgaacagatgaacaaaatgtgctaaattcacgcaatggaatatcgttcagccatacaaaggaacgaaatactgacacatgctaccacatggatgaacttggaaaacattctgccaagtgaaaagagcaagacacacaagaccacatattatatgattccattccagaatagggaaacctttagcgacagaaagtagattagtgattgcttaggactgtggggatgtgatgtgggagggaagagagagatagctaaagggtatgggttgggtgtttgtttgtttgtttgtctgagatgatgaaaatgttccaaaattggctgtggtaatagttgcccacatctatgaatatactaaaagccattaaattgtacactttaaatgggtgaattatatggtatgtgaattacaattcaatgaagctttaaaaaaatccacaaaacttctaaaatagggtgttaactgggattttgagaactgtgtatcacctaaaatggcacgccaaagttggcatgtatgtgcatttctggggtctgtcaattttgctgtattctctgtgatccccctcctcctactaccaccaaaggtaatcaccactgctctgcagagctgaggccccttcaagggctcactgtaatgcttgactgcgtggaaagaatgtgataaatattaatgtaatcaaatatgcagatgcccagttttttaaaataaacattattagcaatccctttgaaactaataactaaccaaggaataggatgcaatactgttccctgcgtttattgttgtagaaaaaggaacggttgtgaattctactctgatatgtaagattttttattctaaattattatttgtaatatggagacctaatcactatcatatggctacttgctgatcatttttacattatttataccttttacaactaagtttaatgacttggcaggaaattaagttatgttatttgtcaagtttctcaacttttaactgaaaacttcatgatcagaagaagaacaaggtctggttatccccgaatcaaaatatgtaccatatgatttttctctgaatcattagaaccacaaaaagcaaagaaatgtcattgcatgatttgactttgtggaaccgtactttatagaccctgccctggggtaaataccaagagaggaaaagtagtaggggcttgtggaactggactgtttgtttgtttgtttgttttttgcatttaaaaaaattatgatatgtgtttaaagctacttgagacatctaaggaaatcagtcgtctctctttctaacgagcaagtgtgtgctctcacactcacgcaaagctcttctctaaatgtgaacttttcatattgaggtaccatatgcccagtttcttcctagaatctattctcactgcgttcaccgtttgcgtcccagcactcccttcgtctgatttgtagcactccctgtacctgccccggctgcgttgcacggagactgcactggtcgcctctcccctggtgaatcctgcagtcactttctggtgatggagctcagcggcccagcacgagagcatggaaacagctgactgctgactcagagggaaagcaagccacccacgaatctcattgcagctcgctgctgcatccctatcccataatcccttgcctggtttgctgcagtcttttcaacagacgctcagtgagaaaaagatgtcctgtaagatcaagaccgattggtgtgaatactgaagggggtcttccacttgttaatgacccagaaacattcctgccgacttccagccttctctcatttcctccatttttctcttcctctgttctgtgcatgaactggcacatcactacttagagcagaagatatgctgggcttctgatgatggctgcactgcatggtagggaattttaaccagtctctttgcatggtgcttcccaacttgaagtgttagcagaaacgtgcgttgttcttttggattgccgcgtagctgcagcgacagacttgggaggatttaattctttgcctcgttggttagtctgtttgtcttcagaaatgggtaggtcctaaatgttcagactgcttagtattgtgccaggtggataactgatttctcctgctctctcggttcttttttctcccttcatctctcatggtgatgctgcatcctctgtagctgtaaaatgcagacccattctttgcttaaacaaaggcaccaaattaacaagtatggggagaaaatcatgcaagattttcttatcaagttctaatgtgatctgactagatttgtatttttaccagtctttattttagtgtgtatcttggcttgttttaaatagaagaattttgccccctgcatctctctgttgggtgcaaacatggagatgaaatatttgatttgcaggattccttcctcgctgccccagggtagaggagaacgtgcgaccctccccccactctgtcctctattagagaatcctggggttgagttccatggctggcagttaccattggaaacccattcattcataatgcatgactcgaccctccgaattctgaatgccattgagggccagcaaacaaacatgtaggagataatttgctttttttctgacaattttttttcctgtctttgaagtacagtcaaatctgggtggagctcaatgatagcattacacagggaaaagaaaaaaagaaaaaaaaaaacccttgggttttgggttggtccttaggtttgcttcctgaaacagtggggattatttttgtgtcagagctttttctacaagtatgccccaccctgacattattccttcttttggggggataggagagcaagtagcaaggcagtttgttttaaattaaaaattgaatgttaataaatggatttctgaaccaaaagataaaatggtattattgtcttaaggaaaagacagtttcaatgtaatagctttcaaaatgaggtgtttaaaagattgtttctctggcttagatcatgttacagcagttttattccttatgaaaatttgttttaaaagaaggttttaaactccagtttatatgtaaggagagccatttgttcatgcagaattcttcaaatgacgtcttagtgttaggattcagttctgcctagtgtgaatctgttttctggtgtctttcattatttcaggcagaggcttgagccccactgttcctaacccactataatgttaaataatgcacgcccctcccaagcagcacacaatgagaagtttcatgtgtgctgtggtatgagaaagcagctttcggatgcagagacaggagtagtaacccttcctaaacctttaagtgtttctgtccaattttctcctaggaagacacaagtgatttgcattggaaaggttaaaacacagctgaatgtaaaaattttctctgatagaacgtgctgtttcaagatatatgaatgcagcatatataacccacacattttttaaaagaagactaaaatctatacacgttttttccataggtaatactatagtcctgcaatgacttaatttttttttattataacaaaagcttcatggattttgttgcttgtgaaataaagttaaaacattcattctttgtcttactaagaaatgaaaatgttctttatctgggtatccttaggcgttaatttctccatacttagggctttcttttatctctttttattaggtaggggaaaatcccaaatatgtagcaatttctaagactcccttgtgcctcttttaattatttctcttataaaactaaaactacccaaatatttgaggtattattgaaatgtgtagaagagaaatacttttgaattttaaaaaatgtgctgccaaattatttactgtcatagttttttcttcaaaaaatatgacttcaattactttttactatggcaaaatgatgatttgcacatacctgtgatagcctttttctttaatctctggtgccatctctgtccctttattacttatataaaggctgtagttcagagtagaatttgctccattatagggttggctattagggttttctgaatattttcattgtgcagatggtctgaatttaacggattagatttcctcatagaaattggagctttagattggaccagaaagtgagaaaataatgagccaagtattcaaatagcatcactgcaggaaacagatttctgcttttagtatgcaaatgtttctattcccttctactttacctcttcggtcttcacattctcgacagcctctatttttccattaagtgctttttgttattgtctttaaacattattaatttaagtacttattctaatcaacaacagaattaaataatgtgcttcgtatataccaggagcaaacaggaggttcctattatgtagagctgtgtctcttagttctgttgtgaaataattttctcttttcccttcttgctagtttcttccaacccctagaattggtaccagcacctagtccccttgctgacctctacctttttttgtggtcccagaatacttagcctctttgtgtagtccccaagcaaagcaagggaggagacctggcaaagtgatgggtgtggagagaggagaccccgagcatcttgactgtcccagagtgctgtgagatgaatgtctattagcctgaccacttaacattccaccacacagacgcagcctaatcttaacaatcggctgccaaaggtgaggcaatggccttctttatatactaaagaaagaggtaggggaaatatgtctttatgatatatcataaagacaagtcaggggctcagcttaaaaatcagcttccatttggtaaaaaccagttcatctgaggaagctgtcatatatctgactctgaaaataaggagaaaaagaaccttggagagcttggacacaccctgcctgaagacaaaagttaaaggggatggcttctgaatgccttccccccaaaacacacacacccacccacacacccacccccccccccacacacacacacacacacacacacatcatcatcatcatcatcatgatcatcatcatcatcatcaggaaagataatgcatctagccttctgatttacaaaatggcccatctgggatagaggcttgatttaactggaaatgggtcaccctgttttaatttcactaaagattgtcctcttttcttctaattgagacctcagtaacaatgcaattcaattgcaggcaaattataataggctgaaattttaaaaattaagaatacccttttcatcatgttttaatttataccacatgttctggcaggtacagggtagcatactgtgatttatagataatccaaatggttcaggatttcctttctataaatgtaccagaagatttgtaattgcttggaaagcagatgtttgcatgtctgcatgagaacaataaaaaatgggctgggccaggcacaatgactcatgcctgtaatcccagcattttaagaggccaaggccggtggattgcttgagcccaggagttcgagaccagcctggccagtatggtgacaccctctcgctactaaaaatacaaaaatttagctggttgtggtggggtacacctgtaatcctagctatgctggaggctgaggcaggagcatcacttgaacctgggaggtggacgttgcagtaagccaagatcacaccactgtactccagcctgggagacagagggagactctgtcttagggagagaaaaaaaaaggcatcttaataaataagtccaactaaagtggcaccaaagagaagcaataacgcaggaatgccataaaattagactgtaggaatgtaattgagtacctttaggatgatgtataatcaaatatgtgacctcttacccacaaatcacatgttaaaattttgtttttcagtagaatcttggcctctgttaccctaccacattccctacaacaggcaaacaagattttgccagctccctccccttctccagaagagcgatttaactttggcttttctctgccattctttcttcctgctcttactcactgtggtgtcagcaataaagagtgtggatagttttctgatctaaatggtataatttgggatggaaaatgtggtctaaatcttagaattgtggacataggcatttttctctcatttcagcttctcctatcaagttcttttgcatttgggggttaattgccaccaaattgtaggagatttgagaaagtgagccaggaaaaacaccagagatgatgtgagggaagaaacgctggagctggatatttttatgcccaaggattttgttatgtgatcattgaattgcttttcccacaacaagctctgtttagttggcaagcccccattaataagggatttatgtgccaaccttcttaggctttttattttcatgcatatgtgtctgtaattgcccaatagttcttcttgcccagtgcacagatacagccgatttaccaagacaacagtattgcaatagagaaagagtttaataaatgcagaaccagctaagtggaagactggactttattactcaaatcagactcccccaaaattccaaggctagggtttttcaagggtagtttggtgggcagggggctagggaatggggagtgttgattgcttgggtcagggatgaaatcataggaggtcgaagctgtcttctggctgtcttcacttcctggatggaattacaaaacttgtggagccagtttactggtttgggtggtgccagctggtccatcagaatacagggtctgaaaaatatcttgaacaccaatcttaggttttacaatagtgatgttttttattttttattgtatttatttattcaataaaatccagaccctgcacaatacaatagtgatgttatctgtaggagcaattggggagggtaggaatcttgcgacctgtggctacatggctccttactgaaccataattctaaccttgtggctgatttgttagttttataaaggtagttttgatcctgagcaaggagaggcttgtttcaggaaagggctgttatcattcctgttttaaagttaaactataaactaaattgctcccaaagttagttcggcctacatctaggaataaacaaagacagcatggaggttagaagcaagatggagtcacctatgtcagattcctttcactgtcataatttttctatgccagatgtttctcactgtcataatttttgtgaaggcgctttcatgtactcaatagttctgtttctttttctgcatctatgaacatgttaaaatatgtcactaatgtttaccctctggatgatggtttatgttgctaagcattagactatcacatgggaggctgggcatggtggttcacgcctgtaatcccagcagtttgggaggctgaagcgagaggatcacttgagcccaagagtccgaaaccagctgtgcaacatagtggcaccccttctctacaaaaatacaaaaattagctgggtgtggtggtgcccacttgtggtcccagctacttgggaggctaaggtgggactctcacttaagcctcggaggtggaggttgcagtgagctgtgagcatgtcactgcactgcagcacgggtgacagagggagaccctgtctcaaaaagaaaaaaaaaaagactatcacattgggaagcaggtaatgtccaaggtcaagtgcaaacattcagatgaccggcaacaaccacactctttatcatggaattcagcaagtgctgctctttgctgctgctgtgaataagtccgtttccatgttatatttcgctagtttgattcattcaaaagataatgtctactatgtaccaggacacttctaggtgctggaactactgcagtgaataatcagatgcaaatctgtgcccttgtaggccttacattctagggggagggcggagacaatatccaaaatatataaattacatagtatgtcggaaggcttagttccagctgctataacaaaaatgccatggattggatgacttaaacaaaaagaatgtattgtctcacagttctagaggttaggaaatctgagatcagggtgcccccatggtgggttctagtgaggccctcttctggctttataggcagatggcccacatggcagagagcagacagagtgggaaagcagtctccctcttatctcctcttacaggggcactaatcccatcataagggctctaccctcatgacctaatcacctcccaaaggcctcacctcctgatcccatcacattgggggttagggcttcaacatatgaatttgggagggacacagacatggagtctataacaggaggtgacccgtgctacggagaaaaacctagcaaggactggggatagcagtgctaggtaactggtggcaatatgcaattttgaacagaatggtcagattgagcaggtgacactgagctggacaaaggggagtgagcttctttgtaagaggtcttgctgtttgttttccacagacagggaacctcagctagtcttccatatgaaaactctttttggctaaggtcaatatcaaactaatgttgaccatttgtattattttaaagtggttctttctgcgtttgctaccatttcctttctactggctttttgtcaatgtgtctgatgttagttcctacatccaaaagcattcgagcttctttacaggcgaagtccaccccaggcatgttttcacacggatcccttcagaagttagttttgcagctctccagcatatagaagagcagttctatattctgatttctttcattatagtgcactgacttccactggttatgtgggtaagaagggtctctgacaatttagaaaacaagatggggaaaggagaccagcaaagcatgtatataaaacatttgttgcttttttaatcaaggagaccagaaactgtggtagtgccccaacgctttgattgaaggccgttgtatattgagtgtattcctcatgacatattcggactgattcagactttccacagtgcttattagctcattctgtgcctcagttcttctgagcacattgtcccattaggagtagtcaaatgttcttcctagtgtgggtatccagggaaggatcattatcctggcaaatctggggatctttggggattggaaaccttttgtgtcgattcttggagttctaaaaatccagatgccttcaacaggtcacttgtgacagatctgtgatactgtcatgattttaaattagtgttaaggagtaaacttaattaatttaccatgcaaattaacaatactacaatatagagacttgctctcacccactacaataattatcataaagttagaatgaaatgttttcatttttggctttagagcataaaatattggctcaagaaatttcatttagtcaacgtatatcatttgattaaaacaaatttttttcttgccaaaaatccaaaattctaaggttaaaaaaaaaaaggaataaagtccaatatgatgctttctctctgcttttttcaatacccagcatggctctgattatttcaaagggtactatgaaaaatttcaaaagctattcaaaataaaattatttttaactgatttcgacggaaaagtttttttttgttttgttttgttttttgtgtttttttttgttatttttttttttaagatggagtctcactctgttgcccaggctagaatgcagtggcatgtcttggctcactgcaagctctccctcctggattcacaccattctcctgcctcagccaccggagtagctggggctacaggcgcctgccgccacgcctgactaattttttgtatttttagtggagacagggtttcactgtgttagccaggatggtcttgatctcctgacctcatgatccacccacctcggcctcccaaagtcctgggattacatgcttgagccaccgcgcatggccagtttaacatctttttaaagaaaatatggaacacttcacaatttgcatgccattcttgctcaggggcaatattttctgtatcattcaaattttagtgctacaaaagtgagcactcatcatttttacaagttacacacacacactctagtgaagtgttaaacttacgtcatcaatttatcagataaggcagaaaacttgaaatctgacctttctgattcactgattttactgaatgaccttgggccagtcatttaaaccctcagcgttggttttgattaagacagacaagtccattcctcccctagtctgatgtcatagggatgtggttaagaaaacagacaggctctcaacattttgagcccctgagagatgagctactttagagagacactctatggaaagtctagcagataatggtggctgatcagacgtcatacctataccgtttaactatgcagtgagttctgtctgaatgtgacactcttgtatagcaggtgcttcacaaggttctatatgttattttattttattattttattttgagccagagtctcactctgtgagtgccccaggctggagtgcaggggcatgctaacggctcattgcagccttgacctcccgagctcaagcactcctcccacctcagcctcctgagcagctgggactatgtatgtgtgccaccatgcctggctaatttttgggtttttttttttttttttgagacggagtctgactctgtcaccaggctggagtgcagtggcgtgatctcggctcactgcaacctctgtctcccaggttcaagcgattctcctgccacagcctcctgagtagctgggactacaggtgcgcaccaccacgcccagctaatttttatatttttggtagagatggagttttaccatgtcggccaggatggtctggatctcttgacctcgtgatctgcccacctcgacctcccaaagtgctgggattacaggtgtgagccactgtgcccgaccttttttttttttttttgtatttttttgtagaaatggggattcaccatgttgcccaggctgatcttgaactgctgggctcaagtgatctgttcacccgaactcccaaagtgctgggattacaggcatgagagatgacacccagcctgttttaaaaatcatatctttaataaacttatctaaaaggtacagagttggaaaatgggtgtgtcatgtttgtaactatactcatacataaacagcagaattttctgggtttttttttttttttttttgactagtcaagtgaagcagtgggagtggagaaggagaaacaaaatctgtaactggttgtgatcggttacctgtaaacaccactgcacttggaccagccagcagccgaattttcctaataaaagttgacacgcttttttaaaatttggtgacttggtaggaaggaaaactattatttatatttggaaaagaatgttttctttagaaagtacagaagtgttgcttctgtaaatatggagtatttccaagctttaaaaacaggcaccaggccaagttaaagtgtcatatgtaaaccaagcttctgtagtgcagcctttttaaaacacaaggtcaagggcggtgttgtggtttaagtagtgaaaaggccatgggttttagagacatatactccttggatttgcattctggtaaacttcttgactgagcctctgttttgtttcttctaatctatagaataagaataatagtgtgacccctcatgcctgtaatcccagcactttgggaggctgaggcgggtggatcacgaggtcaggagatcgagaccatcctggctaacatggtgaaaccccatctctactaaaaatacaaaaaattagccgggcgtggtggcgggcccctgtagtcccagctactggggaggctgaggcagagaatgttgtgaatccgggaggcggagcttgcagtgaggcgagatcgcgccactgcactccagcctgggtgacaaagcgagactccatctcaaaaaataatagtaataataaagaataaagaataatagtatgacctcctgcctagggtcatattaaatattaaacctcttttctttccttccttccttccttctctctctttcttttccttctttatttctttcttttctttcttccctttctttctttcgtaaccacccaacaggttcacctcgcctgctgcctagatagagccaatttatcaagacaggggattgcaatggagaaagagtaattcactcagagccagctgtgcaggagaccagagttttattattactcaaaccagtctctctgagcattcgggatcggagtttttaaagataatttagcaggtaggggcaggggaagtagggagtgctgactggtcaggttggagatggaatcatagaggagtcaaagcgaggttttcttgctgccttctgttcctgggtgggatcacggaacttgttgagccagattaccggtctgggtggtgtcagctgatccactgagtgcaggctctgcaaaacatctcaagcactgatctttggttttacaatagttttgttatcgcgaagagcaatttagggaggttcagactcttgcagccagaggctgcatggcccctaaaccttaatttctaatcttgtagctaatttgttagtcctacaaagggagactggtccttaggcaagaaggggtctttttggaaaagggccattatcaatttttttcagagtcgaactataagctcaattccttcccaaggttagtttaacctatgcccgggaatgaacaaggacagcttaaaggttagaaacaagatggagtcggttaggtctgatctctttcactgccataattttctcagttacagtttttgcaaaagcagtttcactttctctctgtcttttattttctttttggtaaagagtatttccatagggaattagagggctctggacaccttaccaaatatttagaaaatgaagaggtaaattttagctcagccttggtttatgccttcggtgtagaagccaggaattctttaaggtggtaaaaggagctgtgttttgtgttgtaactttttcctctcttgtgctctcaaactctttgctgtcttctctttctgtgttgccctcttctaattctcctttcctggcatgatccctaacattttgaaaccttctctgaattaattcacttcaccaggtctttcaaatgcccagacatgaataccaacagatatttcttttaaattatagggaatacctctagcctttgtccctaccccatagcaaatatattttagtttcaaatctataaacctttagtcctgaagaaaacactctgaaccatatacaaaatctttaattaaaattctaattttcacccccatgcatattaatagcatgtaggggaggaaaaacttttcttctgccctcctagagtatgtgcctagggtctataaattaaagtgacaaaagacagattaacgggagaaaaaggcatacactttttttgatactatttttaattttacattatcaagggcttcacaacctcctctttgggttttatataccattttgacaaaggacaatatattgcggagaactgcctagacaaaagaaagaggggtttggactcctggggcagtaaattgtaggaaatgtatggtagataaggtttgtttagtaagatcattttgcaagatcatctccttgcagtcttcagtgtttaagagacttctcttcctggctctggagagagaggcacctttacaaatggaaatttcctttacaaaagagaaatttatgctctgcttttaggcagatggggaagggcagagaggtccttttctgtctgttctttctatatagctttcagctcaaaataatccttatatcaaagtgacatattttgatgtgacacagtccaacctcttcaactacgatagttggaaaaacatattcaatttcaataagaatatgaaaggtaaatatatgtttaaatatagtcatggctaaaggcataagcagacatagctatataaagtatttatccccttagttaccactgctttgaagcccagcgagcatacctctttgtacaacatgccctcttttaatttgttttgtttgcctggcgaacatgtgaggattttattgatttacaaaataaacaacagggagctgactgtacttgtacagcaataagggttggcttattggtcattttgaggtcactggcattgacttctacctttatttatttattttttattttattttttatttttttgagatggagtctcactgcactcacccaggctggagtgcagtggcgcgatctcagctcactgcaacctctgcctcctgggttcaggtgattctcctgcctcagcctcctgagtagctgaggcaacaggcgtgtgccaccacacccggctaattttttgtatttttagtagagacggggtttcactgtgttagccaggagggtctcgatctcttgacctcatgatccgcccacctcggcctcccaaagtgctgggattacaggcatgagccaccacacctggccgacttctacctttacttatagcacaatgcttatggtgaaagagccagtgattgacttgtacctacagatcattatatgtttttctgttttgattttctgtctgacagcagcagcgtgcagggtcaaagacagccggccccccatgtcagtggtctaggatggccagtgaaggcaccaacatcccaagtcctgtggtgcgccagattgacaagcagtttctgatttgcagtatatgcctggaacggtacaagaatcccaaggttctcccctgtctgcacactttctgcgagaggtaagcctcctttgtgcttggagaagggagtttcgcaggctgacctcctacaacctactgcaggattctttcccagaattctacagttacctttgagagaaaactaatctcttgtgcttctgccagacattgaaaaacagaatcatgagttgcaaataatttactttatttcaaaccattataagcaagagaaagcaatccagtaactactgattcgtttacacaagagatggagcattaaataagaatgttaagttgaaaaatcttttaaaacttccctttgttctttgtgaaacaatttttgtccacagcagatccctacagagggtctttcagagtcaattaaaaaaatctatcatttcctcccatataacaaatcaggtaaaacatctgcatacatgagttgttacttcaaaaggtatagcttctttttcaaagattcttcagacacatactaatgtcacatttgaatgctatgatgttttagataaagaaaaaatatatattaaataaattacctgactatgtaatttgctgtatgtgaaaacagacttccttatttatcttcttcatagagtatttgtttttggagaggggcgttaatcagttatcaaaatatacttttaccccattgtttaacttaccatgtaagcaattaagcataagtttgttagtaattagtttatcttacttataaatatttccctagtaaagttatgtatctttcttaaaaataaatatggtaattgtgttttatagcattttgttaagtacatttttatcattatttaatatacatacttaaaatgctttacttcctgtgatagaactggaaatcagtatttcaaatggcttcaaatctatgctgattacacaaatatctgatttaacatgtctttattatctgattgaccattttttgagttgatttactttgcaaggttcaattgcaaaagaataaccatatccttcatggtggtgatggatagaaggagaaggtagatttgttactagtagttgtggcttttttgtttgttttgggttgttgtggggttttgtgtgtgtgcgtgtgcttgtgtatatgggttttggtttgttttagtggtggtatatagggcactttttattttattcattttatactttggcttaagtgcttggtaattcatattacaaaataattagagtgtgattcctccatccccttaatgggtgcacctaaaacatgaataccagctaatagtccatgtgtccctgggcacacatgggaagatcgttacctgatgtgcagcagtcggcatagcttggctgatactctctatagaagtgcattcagagccactcagtctgaacttggcagaattgccccatatcccagtattcagtgtccagcctatctattgtttgggtcctacttcctcactctgacaggtgagaagcaacactctggctgccctaggtctgcccctgctatcttctttggggatctagcccaacccacttccactccccacccaatagctggtggtagagatttgtgagattctgctacagcaagtccttacacaatgctctgtgttaaaattgttccagcctcatgcatgttgagatgatttcctcttctttttttattttatttttaattttgagatggagtcgcactctgttgcccaggctggagtgcagtggcgcaaactcagctcactgcaagctctgcctcccggattcacgccattctcctgcctcagcctcctgagtagctaggactacaggtgcctgccaccacgcccagctaattttttgtatttttagtagagacgaggtttcactgtgttagccagaatggtcttgatctcctgacctcatgatctgcccagctcggcctcccaaagtgctgggattacaggcgtgagccactgcgcctggccagatttcctcttcttttattttttattttattaattatttattaatttatttattttgagacaggatctcactctgtcacccagtctagagtgcagtggcacaatcacagttcactgcagcctcaatttcccaggctccagagatcttcccacctcaacttcttgagtagttgggaccacaggtgcacaccaccatgcctgactatagagacagggtttctccatgttgcccaggctggtctcaaactcctgagcgcaagcaatccaactaccttggcctcccaaagtgttgggcttacaggcgtgagccactgcgtccagccgagaagatttctgtttgaaggtgttgaaggtgctggcaactttccttaaaatggggttttttgtttgtttgtttgtttgtttgtttttgagacggagtcttgctctgtcaccaggctggagtgcagtggcgctatctcggctcaccgcaacttccgcctcctgggttaagtgattctcctgcctcagcctcccgagtagctgggactacaggcatgcgccactatgcccagctaatttttgtatttttagtagagacggggtttcgccatgttggccaggatggtctcgatctcttgacctcgtgatctgcccatgtcggcctcccaaagagcagggattacaggcatgagtcactgcgcccggtggggaaatttttgtttatgcagagacaaaactttacagcttgtctcactgtcaggagagtgagctctaggacccccatgttcagcctctgctggacattcatactggctactcagtgagcaccttacagtcactctttttttttttttttttttttttgagacagagtctcgctctgccgcccgggctggagtgccgtggcgcgatctcggctcactgcaagctccacctcccgggttcacgccattctcctgcctcagcctcccgagtagctgggactacaggcgcccgccaccacgcccggctaattttttttttttttttttttttttgtatttttagtagaaacggggtttcaccgtgttagccaggatggtctcgatctcctgccctcgtgatccacccgccttggcctcccagagtgctggcattacaggcgtgagccaccacgcccagcccttacagtcactcttatcccacatcttccaaaacagcatcaaaaggcttgaaggagagcaaagccagacatagctgctggccccttggaactcacagcctagtggaggagccagtcactaaccccctaattgctcagactaatgtgaaattaaaccagtgacaagtgctgtacaccagaagtatacaggaaacaatataatagaggaatttgccctaatctgggaaggcttccttgcagaagtgatgattacgcagaaaccccaatgatgagtaaaaattaactaaacaaaggggagtgaatagaatttcaggtatgtgcaaaggtgctatagtgggaggttgctatagtgagtgagaggtgctacagtgagagggttattcaacactgaggaagaacttaaataagtccactgtggctggtatgcagcaaatgaggggaagagacagaaagtatgtaggtgctaggccatatgagatgtgtaatccatgttgccatatatggatttttgtctttgttgtaagagcagtggaagtggaaaccatggcatggctttcatctcagatggtgtgggagggagatttaaatggctctctttgagttttgagaaggtcactctggttgcaatgtggataattgttagagggtacaaggatggttatatagcagggcatgaagagaactggagaggttagaaagatatgtaggcatttggacatgctttggtgatgggttggatatggaaaatgaaggacagtaagggagttactgttttaagaatgactcctagtttctggtttgtttaaataaatggatggaggtgctattcatcaggaatgggagaggatacagtctggggttcagataatgggtttggttttgttcatgttgagttttaggacctgcaagacatctaagaaaagatgtcaacaggtcagttaatgaggctcaaaggagatgtctgtgggaagaaatataattttgggagcctgatgcttgtagccacacctgtgatatgaatataatattccagaaagagaagaggtctcatgatgaatggaaccttgattaactcaaaactgtattgactcagaaaagacagagcagacaggagaaccatgtgagtgtggtgtcataaagtcaagggaagagaaatttttcaataaaaaggaaggtgagcagagcaataatcaagcttaatgatacttcccagaagtctagtaagataaaattgaaaaacatctgctggattcagacgtcgttaatgaccttagcaaaagctgtttcatgtctggtattggttcagggctagctacctctgtgacatagacaagatcagtgaatgtctctgatgtcaggtctattcatctgcaaaataaggggaatggggctaggttggtgtgttttgaattgtttggctaggtactggaaaaaattgtatagtctaattattgagagcttagattatggtgccaaactgcctgtgtttgaatttgtactttgtactctgctcctgaccagctaagtatcttggacaagtacgctggcctgtctctgtctgttgcatcacgtgtctcaaggaatcataacagtacctatctcataggctcattggaagtactttgaattcaatgagcagcatatgtgtgagtcattattagtgacacacttctttaactaaatgagttaagttgatacctgttgagtagagacaaggagaagagatggtgtggctctgactctgggtgtcccattcttgcttcaagcaaatatttccactttgatgtgttttttatatctcattatgattttgtacgtaagaagaattttattgctaacaaaaatatttgatgtgtttctttcaatttcaaagtccacacatttatgagcccactgctagatattgtgggccagtgcttctcaaactttaacatgtatgcaaatcacatggggagctgactcagcaggtgttcgatagggtctaagattctgcatttctaccaaatgcaccccccagggaggctgacgctgctcatccatggaccacactttgtgtgccaaggcactagaaaacactacaaaagtcaatgacattttttatttccttgagcataatcatttgcctcattagtgtgagtacagcttacctgttggtttctgaaatattattttcctagtaaaggagactgggatgggagtttctgccaaataccttgtgtagtcactgagaacatgtatggtacctgtgagaagtggaggttctgcactgtgctaagctctccacctctgcttctgcaacaggtgcctgcagaactacattcctgcccacagtttaaccctctcctgcccagtgtgccgccagacctccatcctgcccgagaaaggggtggccgcgctccagaacaatttcttcatcacaaacctgatggacgtgctgcagcgaactccaggcagcaacgctgaggagtcttccatcctggagacagtcactgctgtggctgcgggaaagcctctctcttgcccaaaccacgatgggaatgtaagtggctgggatggcagatactgcccgggagcatgactactgtggccttggggaggctttgggtacatcagagattacagattgaaacagaactccatgtggaaaaatcagtaattaaaaaagatttttaccagccctcagactacctgctcactttctttgaccagaactatttaaataacgaaatcaatctccactgtgtctccttcacacatattgttggtatccccaggacagcaaaccagtagctatttgcaagctgacctacataaacatctgtgtaataaatttatggatacggatttaacaatggataagttctgtaagttgagaatgattattaaaatgttaattagagttctttatttttcttgggagggaaattttctcatgctacattagaccttattccttattaatagatagaatttgaagctatgtgaatccctgatagtagattatagattatgaattccaaacatatttcttgctactagtgagtacaataactgttagaagctcaggaggacctgtgggtaccatcaagtaactgattcacaatagctatgtaacctgaagaggcagcattgtgtagcgtctaaggacattggctttggagtcaggctgcctgattcaaatcctgctcttaaacttattccctgtgccagctttggtaagtttattaaactctctgcgtctcatttctttatcagttaaaaaaaagtaataatagtatttaccatatagaatattggaagaattaaatgttcaagtcatgtaaatcatatagtaggatcttgataaatgtcagctttaacattttttcattaattactttatattcatctcatttgtatattggtcacttcaaaagtatttgaaactgcttaaaacaaaaggcccaggtataacaaaaccactaagacaagcaagcaatcattagagcaaagcaattcttattagccacactactgtttgtttacctcatctcccagcattctctctgcacactgtgctggagcctcaccagcctcctagaacctgccaaatggtttccctcctcggggcctggctgttctgttccttctgcctgggttgctctttgtttcctctttatgtggcgagcttattctcttccttgaagtctcactgcaaatttctcctgcacacagcagtcttctccacctgtaccgtctaacacaggttgcctcttacagctggttaccctccatcatgtccctgctttctttcctccctggtgctcactgtggtctgcttgccatcagctgtgtatttgtgtacttattagtcctggctttccctctagaatgtgagctctgggagggcaaggacctgtcattagacccctagcactgagggcagtgtcttatacatagaagtcaataaatatttgttgaacaaatttgccagacaccgtatttggctccttaaacccccctctgcaaagtagttgttggttactttcactttataagatgaagaaactgaggctgaaacagtttaagtcacaaagcttgctgggcacattgtaaaagctagccctggaagaaatagcatcctgagctttctggtagccaaaacaagagaaggacaccatggcttacacatctgtaataatttaattgaaagcacaccaggctattaatagctatcagttttccatgcattttatgccaagggaaattgatcatctaaattttgtaaaaagaacttttaaatgctgcttttgaaagcaggttgagtattttcctcatgaccacttctcacactggtgcttagtgaatgctgaggctgtctatgcctggagcttgcactctaaatactagttatgggaaggtatttctatcaggtgtaagagtgccccttaaaatgaggctctctggagacgtgacttgatagaggagtaaagtcttagaaacattaggttgttttattttttatgggttttttagtttttgtttttgtttctgagacagagtctcaatctgtcatccaggctggagtgcagtggcacgatcatggctcactgaagcctcgacctcctggcttaagcgatctttccacctcagtcctgtcctctgccccagtatctgggactacaggtgcatgccaccacgcccagctaatttttgtattttctgtagagacagggtctcactatgttgccaagactggtctcaaactcctggtcccaagtgattcacctgccttggcctcccaaagtgctgaaattacaggtatgcgccactgtgcccagccaagctaatatttctaactgtcattatttctcattctacatgacagccccttcatatcccaaatttacaccagtgtctatagtaggtctcctaatgtttctaagggccagacatggtggctcatgcctgtaatcccagcactttgggaggctgaggcaagccaatcgcttgagcccaggagtttgagacctgactgggcaacatggcgaaatcccacctctaccaaaaatacaaaaatcagctgggcatgatggggctgcacctgtagtcccagctgttcagaggctgaggtaggaggatcctgtgggtccagacattgaggcttcagtgagccatgattgcgcctctgcgctccaacccaggtgacagagcaagactctatctcaaaaaaaaaaaaaaaaattaagaaaaaaaaaataaatgttacctccataagtaaagtgagaatgtcatgaaattcaggcaacagcttatagctcaaggaagcggctagaacatggagacagcggagttgagggtgggacacaggtgggcctgaaaagatagatgtggagagattgggatgagctgtgaatatcattaagaacatgtttgacgtcaatttcttaaattgcaaaagcatcaaagccttctgaacaggagataggtattttattgacattttggaggaatggggtggcagacactaaaggctgggaaaccaattatgagtttactgaattgtccaaatgagagataagagatggaactagaatggcatcaatgggcctggggaagacagcgtgaatttcagagaaaagagtactctttgactcaacaatctgcctcccacaaataaaaaggcctgtgctaaagtctgttaagctaagctattagatcgtgagaacttcagcaactaaaattaatcttatactaggtcacaaagaaaataccactatattttcccattgtgtaaagcaagttcctgccctacaatgcactaaaattacattagtaacacatgtttatggggaaaaaacaaatctcctttaaaagttaataattatttaatcaatagaaaataatagaaataatagaaaattggactatttacaaagtattggaagtggaaactttttatatccaatgtgtagggtcaaatctctacccaggaaattttataggtttaagtattttcctttatttaaaaagaattccagcctgggcaacatagtgagtcctcatctctacaaaaaaatcaaaacatgaggccgagcacagtggctcatacctataatctcagcactttgggaggccgagacaggtggatcacctgaggtcaggagttcgagaccagcctggccaacatggtaaaactctgtctctattaaaaatacaaaaattagctgggcatggtggcacatgactgtagtcgcagctactcaggaggctgaggcaggagaattatttgaacctgggaagcagagattgcaatgagccaagattgtgccactgcactccagcttgggcaacagagtgagactctgtctcaaaaaaaaaaaaaaaaagcagggggggatagtggagcaagaggattgcttgagcccagaaggttgaggcagcaatgagctgtgatcgtgccaaagtactcctgcttgggtgataaagcgagaccctgcccctacccccacccaccccccaaaaaaagaattcaactcaagttagaaaaagagtaataaaataaacatatggaacatacacaaagaaagaaaagaacagaaatatctacacatagtatagtaagtttattaaatacatagtatatatatttctgcattgtaggaaaagctagaaaggtctcccatttcatttgtgatacgcttataaccctgataccaaaacctaatgaagatagaacaaaaagaaaatcattagtagcttaattaatgacattggctgtaaaattattaattaaaataccccagcaaattccttttttttttttttttgctgggtctcactctgtcaccaaggctagagtgcaagtggcactatctatcatggttcactgtaacctccaactccagggctcaagtgatacccctgtctcagcctccagagtagctgggactacaggaacatgctaccatgcctggctaattctttaagtttttgttgagaaaaggtcttatgttgcccaggctggttgcaaactggcctcaagggatcctcccatctggacctcccaaagtgctaggattacaggcatgagccactatgtccagcccaccagcaaattctttttttttttgagacggagtctcgctctgttgcccaggctggagtgcagcggcacgatcttggctgactacaagctctgcctcccgggttcacaccattctcctgcctcagccgcccgagtagctgggactacagatgcccgccaccaaacttggctaattttttgtgtttttagtagagatggggtttcaccatgttagccaggatggtctcgatctcctgacctcgtgatctgcccgcctcggcctcccaaagtgctgggattacaggtgtgagccaccgcgcccagcctgcaaattcttaatatgtaaaagcacttacaaattaagaaaaatatgagcatcataaaagaaaatgagcaaataactcagaaaatccacagaggatatataaatgcctaaaaatcatttatggaaaaatgtcaagcttcacagataatcagttcttttcaaattaactacaaattttttaaaaggtagtaaccagcgctcttgagagtatgtatggtgagacattttcatatgctgtgggtggaagggtaaattgctcttcagaaagtttacgtcaatttgacaaaatataatgagtgttttatacagcctctcatcttttaatccagtaattccaccagtggaaatatttctaaggaaatagctagagcggaagataaagctcaaaaattggaaataatctaaatgtgcaacattagggggcaagaatgcttggcaaattagcagcatgtgccttaaatcattctattgtttgattatagattgtagaagttcactgctgctgttttgaaacagaagtcttcattgcatattcaagccaaattcatgcaatgttccagataaattgctgcagttagttgctgtgagtagatctttaaaaacaatccaagcatctgaaggttaataaaatcaattcattaacaataaagcagggtgctgccatccccactgtctgatgctgattggcacgtgtggatgaaagcctgtcatcaactttaagtgctgtgacactatctgtcttctaattaaactgccatggtggcattgttcaaatacaaaagaaaaagaaaaataatggtcagtgatctaacaggttctttgcacttaaagcagacacttgagctcatgcctcatggtccctggaacacaaatgatcattaaaccctgttattggttgcttaggcacctgactatcaagggtgtcaaaggtgcaaaggagaggtcctcattaagactgccctgccactaacaagtttccacttccatatcaggatcaactgtcagtgcccttaagaagccaagcctcagggttggctgcaagaccttgaccatcttttttgcatgttaggaatgcataggatcctgccagtctcttctggtgaacataaatggtgactatccatcaacaacaagctcatcctagcttttggcctgcccacccaccccaggccgcaccagcatcatctcactggagatggatgaaatggatgagctcagcagaattacacgccccacacaattagctctcagcttaaaccaaagctgtcagaaccgaagcacgagcctttgaaaatgactagctattgataattcaaaatcatttcagggccttggcttcccaagacacacttaagatattgaactaggaataataagccaggtctgctgctgtctcttcaaagctgagatcaatttttgtttgtttgtttctgaagtaaaattcaggctgggcttggtggctcactttgggaggccaaggcaggaggatcacttgaggccaggagtttgagacatgcctgagcaacaaagtgagaccctttctctacaaaagtaaataaatacataaatacaagataaaaaataaaattcacatcacataaaatttaatatttcaacaattttatttgtttgtttgtttttttgttttgagacaggatctcactctgtcacccaggctagtctcaaattcctgggcttaagcaatctgcctgcctcaacttcccagagtgctgggattacaggtgttaaggcaccgagcctggcctgttttttttgtttttctttttataatgatgttttttatttttaattttttttttggagacaaaaaagtctcactctgtcacccaggctggagtgcagtggcatgatcatggctcatggcagcctcaatctcctaggctcaagtgatcctcccacttcagcctcccgagtaactgggactataggcgcatgccaccaacctagctaattttttttttaagagataggttttgctatgttgcccaggctggtctccaactcctaggctcaaaggatcctcctgcctggacctcccaaagtgctgggattacaggagtgagccactgcaccaggtctcaaccatttggaaaagcacaactaatgtggtttttagtatagtcacaaagttgag

SEQ ID NO: 523 - DNA, 4873 bp, Homo sapiens
agccattgatgtcagcatatctaacaccatcattctctataagaagaaagtcatttagctccagctggcgtgtttggtgaggagcccttcccagaataccttaggctgtggtatttgtgggcagccagccaagcagcaggtgtgttgactttaaactgacttcacacttactgaaaagaaagaagaaatgtacaaacctcctgtctcaaatcaaggggtttacctgctccctgatatgcaaagttctgcactcctggatggaataggctgaggagagagaagaaagattctctgggggttgagggtggaaaataaacagaaaggagagtgtgagtgtgtatgtgaagtatgtgtgtgtgtttgttgttctggagttttttttttttttttgagacggagtctcgctctgtcgcccaggctggagtgcagtggcgcgatctcggctcactgcaagctccgcctcccgggttcacgccattctcctgcctcagcctcccgcgtagctgggactacaggcgcccgccaccacgcctggctaatttttttgtgtgttttttagtagagacggggtttcactgtgttagccaggatggtctcgatctcctgacctcgtgatctgcccgcctcggcctcccaaagtgctgggattacaggcgtgagccaccgcgcccggcctgttctggagttttgtaaaacagcaaagccatggcattttgctcttgaggggcgcagaatttaaagtagaaagttggcacatcactgttttaagaaatgtctcttgagatcccacatcattcttatttcaaatctaagtttcctgggcaaagtgtagggaaagcagcatagcaaactctaaagaattttatctcagaaaatgagttttttaaaaagatggagtcatcctatgctttacatctcaagggctgccattagcagactacaatgtatgtgaataggccaccctgttaagtaacatgcgggttgtggcctaaggtacattcaggactcagcattcttccccttgataaacactcactgaagtggtttccccaaccttgagccactgcaacaatgggcattgcgtatacctggactagatttctttaccacccataaactcccacttccttatttagctgtctgcagcaaaggtctctgcaagagctgctttaagcaggcaaaaggacgacatgaagttgttggctgcttgctcagcttacctctgagatagacttgacaaagcggatcccatcattggctcctttcaccttggccaggcaggcacagaagtaatcccagtagtccttcttgttgcccaggagggtggccttctctttctgatcaaactgggtagggaaagggaaagggagaggaggtccaaacccactgctcttcattccggcatttaaatgataaataataacaatagcttcttaggtgccagcactgggtgaggccctttattggcattatttttatttattggcaaatcaaggtgtgttaataccctgttcatacagctgggtggaaaaccaccgaaggtgttattaacggatgagaaagaaatacaagaaaagagtcttggccatgtgcggtggctcacgctggtaatccagcactttgggaggctgaggtgggtggatcacctgaggtcaggggtccaagaccagcctggccaacatggtgaaaccccatctctactaaaaatacaaaaattagctgggtgtggtggcgggcgcctgtgatcccagctactcaagaggctgaggcaggagaatcacttgaacccaggaggcagaggtagcagtgagccaaggttgcaccactgcactccagcctgggcaacaagagtgaaactctgtctcaaagaaaaaaaaaaaaagaaaaagaaaagagtcttaagggcaatatgaagagtgttaactatgcttcgacttagggaaataagataatgaccttttatcccagttactcaacacttcagtttcaatatcgttttaatacacctacaataaatttaaataaatgtcagctctgagtcatttcaaacccaaaaccaaaatgggcttaattgaaaaaaagaaaggctcaaaaacatttttacaatgttaaagaaccagctgaaatgtcatgagagaggcaagcccttcagcacgttaggggcctttcctctagtgggcccgcatactacgtgctttggtgggatgtgacgttgcaaaataatggtgttcacaatgacacaggtatatctttctataacattttatagcattttttttctgattacagaagcaagatatgcgtatgttattaggatatctagataaaacaaaacacaaaaatagaaaaaaatttaacacctaataccactaccctaaaataacttctacagcatttctttcctgcctattttagttgcatgcatttttccacatctgcagtgttttttacatcagcactttttgggctaagcagggataagagttataccatcaatatgttaaaagaaaatatcctgggctgaccccagagattctgattcagtaggttggggtgggagccaagaatatactacaaataagctcccagaggatgctgatgctgctggtctatggactgcacattgagtagcaaagctctaaaacagaagcccatggataatctttagagggtccacacactcttagaatctgcctgcaaaaatgcgtgattgtgtgtatacatacacgaatgtctttttgggaagactctatagctttcactaaactcccaaaggggtatgtaactgtcccaaagttaagatctttgccatacagtaaccttctgacctaccttacaatgacctaaatctctaaaggatgttcttgattctcaaagccatcctaaggggcaacattgcaattccccaaaggatcacacttggaggattgagctggcactggggactgctctgaccttcaatctaaccacgagggcttactggctccttgggctttctgaaccatatcttgaatgctgatgagtcacccaagagggagaaaagagataccagtgcaaaaatcaacacattacaggcatcacttacttgcaggagatactcaagtttataagaaaatttatgcaagctggtgctgtcatccgtgatgggttcccctgcttcctgaaattctttgcttagttctgtcacagcatctttaagacaacaaataggaacatgtaaccagatagtgactaaactcagacagagaagcagaaataatccaggaagcatgaggagcaagtggtcagtgatacaaagcacctctgaaacataaaagggtatgtaagtatccatgagatataactccaagtcagggagtgttgaaatgtcctgagagctcacagatactttacaatgcttgttgactgggcacatttcttgttcacccttgtctgtccaccacccagggctagtaatttgcatatagtagctggacaacaaatgtttgctgtgtggatgaatcaattcagtccctgaatactgacttccagaaagctttacctttattctagccacatttcaggttcttcactataatcctactgctcattataggtaagcgcaggatcagaatacccagtatgtgcaaataatagtagtgacaatcacaattccaacaatgacaaccgcacctgcttctgttaactgagtgtccttgaggggctgggcctttacatgtatttttctcatttaatatggcattgagaggcagggattgccttatttcgatgaatctaagatacaattaattataatatacattacagtttcagagctgttaaaatgtcaaaaaaaaaagtacaatttagaatctatgaagtctgctatgattatccccattttgcagatgaggagtgtacagagaaatcagagcacttggccaaagatcatgggtggcaaacagcagagctggaataagaaccctggttttctcaagagctgtctaactccagagctcacctcttaacttctaagataattcacctccctgtgtagaaaagaggaaaacccacctttgactctcactcactgcctctgctgtgggacagagggactatcgagacactggatttggtttagatcctggaaaaccttttcccagcagagatggtgggatgtgcttcacaaaactatctgcttctctggcaattcttaaattcctaaaccctgctcccaagaaccatggtttgaagcagacctgtccaggactgaagccaagcctaagatggctgaaaatgtaatcaacacgacccctcaggcaaagattagcaaatggtggagacaggttcttgggactgattcttacaagtgactgttgtccactgtaccttgctagaagtgtctgcaatggctggcactgacagccagtgagccaggggcctgggagagacaaagagccttcctcctccaccctcctgcctcctcaggccaggtaaacactcgcaacctgatctgggaactcctgaaactttgaaggagtagactctggatatgaaatatgaaattttcagctctaatctctgatattctaagtaatattagctttgcaggaattactatttgattctttcaataatcttgagaagtgggtgttatcatcaaacccacctggcacatgaaggaagcaactgtgcgttggaaaggtgaagggacttgtccaacattttcgagggttaaaagagaagccagaagctgagcacacccctgcctgactccaaagtctttgaaactgctgtcaccaagaggataagtgggctgccctgcagaggagtgaaggctgtgtaccacacaaagatgcctcagttaaggacactccactctcatggtagatgc

SEQ ID NO: 524 - DNA, 2399 bp, Homo sapiens
gagtttgaggttgtagtgagctgtgatcacgccactgcactctagcctgggcgacagagcaagactctgtctctaagaaaaaaaaagaaaattacattgaattcaaagcagacttgaggggaaattagactccacctctttatcagaggatccacaaaagatcatggctgtgttttaccatttaccaccttctttctgaccagcttgagatttactaggtcatggttgttcattttagattgaccatggcttgacctaaatggtcattatgttttcctgctttttatattctttttaactgctagattatgtgcccatgcagtgaagtagtagtctttctggagcacacactgtgggtatttctttgatgataaatgtataataactaaaatagtttagcaagataaatatctgagcagtcccgtagatataggtaactgtgaattcaaggggaggacctcagaggactaaaaagattttttaaaaccgaagctatctagagaggaagagggagggatggagtttgaagtgcaccccttcaagggtgcacagagaccaagacaactgaatctgttgccaaagttttgctgtagccaaaatgtttaatagagccctggtcttgtcaagaaaagtattagaaacagtacagaaaagatgattctagtcttgtattagaccttattgtcctgaacctgaagtgaatcaaccactcaatgaagacagtcttcaggaaaaaggcattaaagtggtcaaacggatagcttatgggagcagagagggaagggataggctcctatatgaaggcagactaaagatggtgaactgttctgcatccggaaagggacatagcccatgttcccaaagccatgaaaggtttgagtcagggaaaacccttataagccaagttggtgaggaggaagcctggaacaaatggaggaagttccacctccccctgtaggtagtgggctgggacccgttattttaagaggtggtgatggtaaccttaaaaaagcagcccaattttaggtagagtcatccatgagttctgaaggagacccctaaccttctcctgtcctatgaagaactctttggaggaccagtctgagggagaaatctccctgtggtctgactcagagtggaagagccaaagctttactatgggttcaattctccaagcctgtgatttttcaccacctttttctccctatgtcaggccatttagccatcatctcgtgtcaaccaaagagatcactggagttggggagagatggggagcaaaaactgacacgttttgctgttgctgcctcttagcaactcagataaaagggtttaggtttgggcaagggaaggtagtacatggtgggagggagagttaaggtggaggctcaagatattttcataaagcagtttagcaggctgggcttagtggctcatgcctgtaatcccagcactttgggaggccaaggcaggaggattgtttgagaccaagagattgagactaggctggaaaacatagtgagacccccatctctcaaaaaaagaaaaaaaaagcagcaacagcttagcaattgtggttgtgttttgattcccacagcctccctcatttgatgctgaggcatgggtccttggatcttaatcatttggggtcgtgggtccctctgaaaagataatgtaaatgctggaccctctctccaaaacctgcacatatgcacacaacccacactttgtgtataattttggggataccagagcctttgaagcccatcccagactcccagggtaagggccctgggtaggcagcaatctcagaccgagatattgggcccagccccacttctgccaagtcatgtcatctgcatggggttgcttaatctctctgaacctgaattgtctcaacacggagtgagcctgccttcctaaggccctttccaacaccaatattctacgatggcagtgagaaggaaatatagtgtgtaagggaaggattattataaacaatcttcttgattttttttttttttaacttagagattgagaaaggttgtttctaattattgcttgactggatgaaaggtataatcaaaatatgatgctaaattagtgtgtttttcctagactatgaaattcagaggcaaatcaatgaacttgagaatggaggtgaaattctgaacgaaacacgctcatttcatcacaagctggggtgagttcgcattgctgagcgtcctgaccacagccgggggtggtgcgagagggctgggctcagccactgaccagccatgtgaccttgaaggaggcacgtagcgtctccacttttaggtttcctcattagtacaattagaaaagtactgtacccttcatgcctgtaatcccagcactttgggaggcaatgggcagatcac

SEQ ID NO: 525 - DNA, 11149 bp, Homo sapiens
tgtacaaaataaataaataaataaataaataaataaataaataaataaataaagtgatcataagagcctgggcaacatagcaagaccctcatctctacaaaagtgttttaattatctggttgtggtggcacacacctatagtcccagctacatgggaggctgaggcaagaggatcgcttgagcccaggagttcaaggctgcagtgagctatgatcactccactgcactccagcctgggagacagagtgatgtcctgtcctgaaagaaagaaaaataaaggaaagtgggcatctgagcactcatttgaaggaaatcctccggaatcgattcagaaatcctcatgaagtacccagaattccctgctttggagccagccagaccaggatgaactaaaagtgactgaacacttattatctgccaaccactttacatatattaactaattgatcctgatgccaatcctataaactaggtcctacttttattatccttttgcaggtgagaaaactgaggcacagagtgagcatctaagctgcccaagggcacacatctagccagggacagagttgggatttgtaccagctggtttggagctcaagccttccatcatcacaacagcttggagaggtaagtattattatccccgtttttatagataaggatattttgataaatgttaagagatgccacaatttgccagttgactggcattcaggctgcacctgtcacggctttcttcgtggcactgggtgttctgcatagaatagaaaaatgctttcctatcaccacccaagatcacaaactagtaaagaagagccagtatttccatcctggtctgtctgacttcaaagcaaggaattctgggtccttcatgcggattttctgaatccattccggagcgtttccttcagatgagtgctcagacgctcactttccttttttaatttttctttctttcaggacagtacatcactctgtcttccaggctggagtgcagtggagtgatcgtagctcactgcagcctcgaactcctgggctcaagcgaccctcttgcctcagctttccatgtagctgggactataggtgtgtgctagtacatccagataattaaaacatttttgtagagatgggtgtcactacgttgcccaggctcactttatttatttatttagagacaggatctcacttcatcacccaggctggagtgcagtggtgtgatcatagctcattgtagccttgacctttctggcttaagtgatcctcctgcctcaccctccctaatagctgggactacaggcacacaccaccatgcccagctaatttttacttttactttttatttttagagagataggtcttgctatgttgcccaggcttgtcttgaactcctgaactcaagcaatcctcccacattggcctctcaaagtgttgggattacaggcataagccaccatgcctggcctatttatttatttgttaatttttttaaaaaaaattgagattgcaggaaataatttttaaatttaattttagttttaaaacggagattgcaggaaacaaatatgctcacttttcaaggtccttctctggcttcctctggagactggagatcagggctgggaggtctgcacctggctaggtcacgtgtctgtcaatgcccctgtatctttaccactgcagccttgacccagtgtctcactgacactactccctgctcctctcatcctagaccacatttggtttccagaactctcacagttgggcatgttttggttgctggtaacagaaaagtcaacttaaactggtcttaacaataaagacaatttattggctcatggaaccgaagaaagtacagagagaagatggcctctgggcatggtttgttcaggactcttggtctgtttctctgattctctcaactctgccttcttctgtgtgttggttttttccttggactgtttttgccatttatggtagcaaaatggctgctgactgcaacaagactatatacttgcttttccacattcattgagcaaacatctgaactttgctctgactggatcatcttgggtcacagactcactccctgagcctgttgctgtggttacgaggacgtcactggggagagaggagaaacctccctctacccctttcctctactttgatcccagatccaagtggattcttctggaggaatgagaagagatgctgaagctggcataaggctgatgcagggacaaaatagatgttcttacagccacattgtgctgttcacatggtctgtgcagaagtcatcatgtttaaaacagagtggtaagaagatgtcacccaaagagatactacattttgccagttgactggcattcgggctgcacctgtcacagctttctttgtggcattaggagctctacatggaatggaaaaatgcttctcagcaggaacattctaggccattttaagagggcacagttataagtgggaagtgaggtatagaagataggttgggtgggctgacttgctggaacattttgaagtgggtaaaattttattctaaactcatctatatgtgctttctccctccttcagtgaaatgctcgtcctactgcgaagtgaaaggttctttccacccttgtcctccagatgcaacttctcctggagaccccagcattgctgttgccctcaccacactcatgcagcagggctgctccccttcactcctcgggctccaggagaccagcctcttccctaacccctcagtgattccttgaaatagactggaatagtgaaccgacttactgagggtttaggaaaagcagaagggaactatacaccaagaagaacttaacatacggtgttaaatatacctgctcttggccctggtctttctcaagggggtgtctcacaggggattccctgtctagcaactgctgcccccttgtggcaaaaactatccttctcccggcctcagggtctttcttgagtataggcaggtgttttgcagtctaggcccccgtcttttttctcctgtgtccccagtgactattttctgcccttggggctgattttccctagatgattaatagagggagtctcccacctcctgggactaccccatctttgactcctttctagtctaggcgttagagcacaatagtccaacatcagtaaaagcaaagcatgagtggctattgtccccttacacttcctgttaccatctatgaatgataaaagagcccaggaggaaagcacaacttagcttaaaaaataggcttgccggctgggcatggtggcttatgcctgtaatcccagtgctttgggaggcaaaggcaggaggatcactagaggctaggagttcaagataagcctgggcagtatatcaggaccctttctctacaaataaataaataactaaataaaaaataaaaataaaaatataatataaaaaaagaaagccagatgtagtggctcttgcctgtagtcccagctattcaggaggttgaggtgggaggattgcttgagcccaggcatttgaggttacactgagctatgatcacaccactgcattctagccttggcaacacagtgagagcctgtctcttaaaaaaagaaaaaaattctttccagtgcagaactgtaggaatccatggcatggtaaatttggcatttgtggtagggcaggatttatacttgcacagactggcattagctccaaacattagaggaaggttggaaagaagcaatgccaggcagaccaactgggctgtgtggaagtgaagctatcaggcataccagtgactttagtgtgtagccaaaagcaatagacactgaatcgtggtggtgacttatggtccatgaatcacaggagaaatgtctcccttcatttattccacaaccattgattgagcacctactatattccctgaaagagaacataaacatgaattgaagaaggttcttgctgtctcatggctcccaagctagaagagggctgacttgtaaatgcctcacagcagggttcatgttatatggagaagtgacgaaggtgccagaagactcaagctaggggacagccattagctgctggaggcagctaaggtgggttcccagagaagccattctccgttactgagatgggggctgcagtgaccttgaccacagctcttccattcatggactgccccagctctgtggtctctctgctaaccagccagactctgggagtggcctatgccgtcagcctcagggccatttaaaccaactggtcattggcagtgattgtgcgaaagagtggctggcggcaaaggagggtttgtgttccattcaaataccctcaaaaagcctgaaaaataagtagagattgaggccaggccttggagttgtggaaggtggagaacactgggaagccaacctccaaagaagaccaggttggaggcaaaggaggaaggggagctctcgttggcaaaccaacagggaagccaaggatatcccagtaactgctctcacatccttgatgagaatgccttgaatccgagctaggccacctcaaagaagcctgcaaaataagtagagattgagtgcctgctgttcaaacacaactcaagcgcagtcctcctcctctttcccactggattgcccccaagtccctcctatgggggactccttctgaagtctctgctgtaagtcaaatccttcgccctttatacttggtcaggaagttgcaagcttccacaggtgatatactagggaatttaggaataaacaaatggaaataaattcaagaaaaggaaaataataaaaatgatcatccatagagtggagaattcagataatggaccctcaaccccagcttcacacctgggacccccacttggtcatatggaccctggcagtctctaatcacaagtctgtgatcccttgacttaaactgttcttccccaaatgtagacatgggtggggctcagaagggaggtgtcatctgatgtggtttccttatttccgtttattcatcaagtgccctctagctgttaagtcactctgatctctgactgcagctcctactgttggacacacctggccggtgcttcaggtaggaagccacctctgtttgctaggactttctgtggggtagggctgcttggcttgactttattttggaaaatgtattcatttctgtgggagctgaggatttctgctgcccgcttcctctcttgtgaccaccactcatacatggagttagcaggtgaagaggacagcctcctcatcccctctttttataccttgcccttttgtgggaagaggctgaccattccccaatttgatgtttattgcttcaccttaagactttgtcttcagtgaaaatgcaaatactggtagggagggaacacactaaaatgtgtggatctgagtggactcatcatacaccctcaggcctggcagcaaatgagaggtggatgattctgtcttcctcgatttgcagatgagaagactgaaatctataggggtacgagaccccactcaaggtcatgagacttatttatttatttatttatttattttgagatggagtctcactctgtcgcctaggctgtagtactgtggcacgatctcggctcactgcaacctccatttcccgggttcaagtgattctcctgcctcagcctcctgagtagttgggattacaggtgcacgccaccacacccagctaatttttttgtatttttagtagagacggggtttcatcattttggtcaggctggtctcgaactcctgacttcatgatctgcctgccttggcctcccaaagggctgggattacacacgaaacttattaatggtagaatcaggatggaatgaagactggatgctaggtgtctttacaaccaacctcggtgactttccaaaggctttcagacttctctggagagtcctggagctttgaggggctctttaggggccatctgggttcggagattagcacactctgccccacagtggctcagcttttatctgcttcacatactgggcttctgggaagatcttatttcagtaaactatttcacaataggaaatatatttgaaaactcttgaatgattctgtggattttttcaggggtggagggtttcagggaccaagatggagactttatcttctcaaatacttaaaactcctttagacagaggaacaaaatatgtgctcctcatttaaagaaggcttaaaatatacagtttaatgcaatgtgttgttatcacttccttcccccagtagattttaaggagggtaaacaagaatcagggagaacataggaatagaaatagtagaaggggacacctgggaacaggtttgccttcttgcattttgcttaatgctggcccttccctgaatgtctaagaccaacctggtccccacatccaaatgcacagacacagctgaggatggagaaggctaaagagggacagaggtagagacataggctgagaggaggcagttgtaggttgagctagggctaaggtgttttccccatattccatcttaccccacactcaggccaggccttagagttgtggaaggtggagaacactgggaagccaacctccgaagaagaccaggttggagtcaaaggaggaaggagagctctcattgccaaaccaacagggaagccaaggatatcccagtaactgctctcacatcattgatgagaatgccttgaatccgagctactaaatcacatttccttccttctaaccttccagttagatcaaaccattgctgaaactgaagaggacatgtcaaatattacagatccacagatgtgggattttgatgatctaaatttcactggcatgccacctgcagatgaagattacagcccctgtatgctagaaactgagacactcaacaagtatgttgtgatcatcgcctatgccctagtgttcctgctgagcctgctgggaaactccctggtgatgctggtcatcttatacagcagggtcggccgctccgtcactgatgtctacctgctgaacctggccttggccgacctactctttgccctgaccttgcccatctgggccgcctccaaggtgaatggctggatttttggcacattcctgtgcaaggtggtctcactcctgaaggaagtcaacttctacagtggcatcctgctgttggcctgcatcagtgtggaccgttacctggccattgtccatgccacacgcacactgacccagaagcgtcacttggtcaagtttgtttgtcttggctgctggggactgtctatgaatctgtccctgcccttcttccttttccgccaggcttaccatccaaacaattccagtccagtttgctatgaggtcctgggaaatgacacagcaaaatggcggatggtgttgcggatcctgcctcacacctttggcttcatcgtgccgctgtttgtcatgctgttctgctatggattcaccctgcgtacactgtttaaggcccacatggggcagaagcaccgagccatgagggtcatctttgctgtcgtcctcatcttcctgctttgctggctgccctacaacctggtcctgctggcagacaccctcatgaggacccaggtgatccaggagagctgtgagcgccgcaacaacatcggccgggccctggatgccactgagattctgggatttctccatagctgcctcaaccccatcatctacgccttcatcggccaaaattttcgccatggattcctcaagatcctggctatgcatggcctggtcagcaaggagttcttggcacgtcatcgtgttacctcctacacttcttcgtctgtcaatgtctcttccaacctctgaaaaccatcgatgaaggaatatctcttctcagaaggaaagaataaccaacaccctgaggttgtgtgtggaaggtgatctggctctggacaggcactatctgggttttggggggacgctataggatgtggggaagttaggaactggtgtcttcaggggccacaccaaccttctgaggagctgttgaggtacctccaaggaccggcctttgcacctccatggaaacgaagcaccatcattcccgttgaacgtcacatctttaacccactaactggctaattagcatggccacatctgagccccgaatctgacattagatgagagaacagggctgaagctgtgtcctcatgagggctggatgctctcgttgaccctcacaggagcatctcctcaactctgagtgttaagcgttgagccaccaagctggtggctctgtgtgctctgatccgagctcaggggggtggttttcccatctcaggtgtgttgcagtgtctgctggagacattgaggcaggcactgccaaaacatcaacctgccagctggccttgtgaggagctggaaacacatgttccccttgggggtggtggatgaacaaagagaaagagggtttggaagccagatctatgccacaagaaccccctttacccccatgaccaacatcgcagacacatgtgctggccacctgctgagccccaagtggaacgagacaagcagcccttagcccttcccctctgcagcttccaggctggcgtgcagcatcagcatccctagaaagccatgtgcagccaccagtccattgggcaggcagatgttcctaataaagcttctgttccgtgcttgtccctgtggaagtatcttggttgtgacagagtcaagggtgtgtgcagcattgttggctgttcctgcagtagaatgggggcagcacctcctaagaaggcacctctctgggttgaagggcagtgttccctggggctttaactcctgctagaacagtctcttgaggcacagaaactcctgttcatgcccatacccctggccaaggaagatccctttgtccacaagtaaaaggaaatgctcctccagggagtctcagcttcaccctgaggtgagcatcatcttctgggttaggccttgcctaggcatagccctgcctcaagctatgtgagctcaccagtccctccccaaatgctttccatgagttgcagttttttcctagtctgttttccctccttggagacagggccctgtcggtttattcactgtatgtccttggtgcctggagcctactaaatgctcaataaataatgatcacaggaatgaatgcatgctgaaaagaccactcttttgcacaccatctgctcaaagctcctcttgtctgtcctctccgctttcagcctccgtctgtccacttattaagtttgcctttgtggtttagcttcattagatgtttatctgtgtaaaaatgtcccaagtgaggacttaagatgtcagggctcttctgatggcaaatgatagaaagagaagtcaaactagcttaagcaaaactgagagtgtgggtttagcctgtgtggggaaggatcagggaaggcttgaggttgggaatagggtgaggctcagagacaggacctagatcaagcttcagatggggatcagtgattgatgttgaaatcaaagctgggatgggggcagggatggggtggcagcttgggatgaggtcagagaaggatgaatgccaggaatcggtagagatctacaaggagggagagtgagagtcagggtcacagtgaggtgttgggaacagggagattcaacatggagctgggaccagatatggagagtgagactttggaatgggataagtgtgggggagtggtgaggctcagggagggggtgtcaggcctggaatgaatatcagggaaggcttagtagctataaggctggagcagaagacgtgcctggtagggtcaccatcctatctggagcatcatctaagatcctcttccggggccaaaagacagaggctcctcagtctgtcctgcttaagactctccaggcaggtgagtgaggagggagttaggcactcgagccctaagagatagacctgattcagcagagaagacaagaaggatgcaaaggatgcacagagaatctagggcagaaggctgagaactggggcctccttttcctctcctccctccgctgatctccctccacctctcctactgtttcctcaaagtccaacttcctccttcttcaccttatgctcctgcaaggacaactccatcagaggcttcagtaagtaaatagggatccacactgggtccaggggaaatgcaaatgactcataacctcatgaaaaatgctcagtctcactaggaactaaatgaggctcaaacagcaacaaaataactcagaagtgttttaaacaggggagggatatagtggactcttcaaacaagtgcaacatttttcgattggattttttttttttttttaatgagacagggtcttgctctgtcacccaggctggagtgcagtggtgcatacacagctcactgcagcctcaaccttctgagttcaggtgatcctccaacctcagtttccagagtagctgggaccagagctgtgcgccattatgcccagataatttttaaaattttttgtagatatggagtcttgccacgttgcccaggctggtcttggacccctgagctcaagtgatctgcctgcttcggcctcctaaagtgctgggattacaggtgtgagccactgcacccaggctgattggaaattctaatgcagcctgtaattttctgggtatagctcaagacacaaatgatttggatttcagatttttaaaaaatgtcaggattttggtacttagttaacagcatattgaagtaccaaaaactgatatttcaattactagatagggtgaggattagatccagtcagagccagggagagtgtttgccttaaggagggactcccttgtccaggatggggctggcactagggatggggtgaatcttaggacaggagtgggggtcagaaatgggaggggtcagtgatgagattgggattacagaggggatgtacatcagggtaaggtgagggacggggattaggatgtaacggcatgttctgcacaatgcttcctgatgttaaaatcctaaagtttgttttgtagccttggtgacaacgtttgagactctaaatcaaaatgtgaaaatctactgttttcccctaaaccagttccacttctgaccaaccacagcctctcaccaccccttgccctccatcccctggcccattct

SEQ ID NO: 526 - DNA, 11230 bp, Homo sapiens
acattcagagacagaaggtggatagacaaatctccaccttcagactggtaggctcctccagaagccatcagacaggaagatgtgaaaatccccagcactcatcccagaatcactaagtggcacctgtcctgggccaaagtcccaggacagacctcattgttcctctgtgggaatacctccccaggagggcatcctggatttcccccttgcaacccaggtcagaagtttcatcgtcaaggttgtttcatcttttttttcctgtctaacagctctgactaccacccaaccttgaggcacagtgaagacatcggtggccactccaataacagcaggtaggtgacttgttcagtctgagatgctggcaacatatttctaatggaagagatctggaaacttcagcctcctctgaggcccctgagaactggggtgatgaagtgtagaagcttagagctaaagacaactaagtcttcacctagacagtgttgcacaaaagaattttctgcaataatagaaatgtcctagacctgccctgcccagtatggtagccactagtcacacgtggccacggagcacttgaaatgtgactagtgtgactgcggatctcaatttttatttcattttattttattttattttttcttttttgagacaggctctcactccaatgcccaggctggagtgctgtggcatgatcttggctcattgcaacctcaacctacaggtctaggtgattctcccacctcagcctcccaagtagctgcagctacaggcatgtgccgctacactcagctaattttttgggttttgtttgtttgtttgttttgtttttgtttttgtaaagacagggtttcgtcatgttgcccaggctgatctcaaactcctgggctcaagcgatccgcccacctcggcctcccaaagtgctgggattacaggcatgggccaccttgcctggcctttattttaattaattttaatttaaatagctacacatggctagtagctagcatgctgaacagaatagaattagaagaagctcccgttttccaaaggcacacaacaaggcccagaaagaatgacttctccaagcaggattagaagccaggtttttgttttgtttttgtttgagacagggttttgctctgtcgcccaggctggaatgcaatggcacaatctcggctcactgcaacttctgcctcccgagttcaagcaattcttatgcctcagcctctggagtagctgggattacaggcgtgcgctgccacgcctggctaatttttgcatttttaatagaggcggggtttcaccatgttggccaggctgttctgtaactcctggcctcgagtgatccactcacctcagcctcccaaagtgctgggattacaggcatgagccaccgcaccagaagccagttttttaattcactccaccctgcatataaccgcagtgatctccatggaaatgaaattgacctaaggagcatgaagaaggaggctgactgggaaatgtcaaatctgggctcccctctctacatcctttgtatctgactttctgggacacagggaggtacctaatggagctcagaaactttaggctgggatcctgctccttattacagtgaacaggagataggatttgagagcagatttttagaagttttttaaactgaaaacctagttcagctgtgtcactctaggtatgttgcttaacctctcagagtcttcatttcctcttccagaaagtgcctgcttcgtgaggttatcctgaggattaattgatacaaattctggaaagcactttgcccagaagctagaacctggtagacactcaacattacagctaatatgacaattaatatccaggtcaaagtaaattagatgtcatcaaagtcagccttgaaagcagacccactgccgactgctttcccttgactggggatgtagtgagagaggcagcatgttatcagtgaataaactattccagtaataatgatcacaacaataaaggttaacattgtactttatgtatgttttacgtgatttacaagcaatccctcatttcatcctcaccacaaccccatgagttggattctgtattggccccattttacagatgagtaaactgagactcagaaaggaaaagtcacttgcccagaattgctcagctagccctggtgtcatctgcctctctccatatgtaataagcctctatctggttttagcatcaactggccaggtggcattgcattcttccccagcttgggaaagagaggtgacaaagactaagaaacatttgctgaacagttggactcaaagattctttctttggggtaggcaggcaatttaagtgcgtctgccacagggattgagtcccctctgggccctgggatgcatggagcaagagatagggtaaggaataatggaggggattgaggtgttgttcactggggtgggcacttgtgagacagcagaattagtgttcatggctctgcctggattaattcattcatttgtaatcaatagcaaattgataaaatacattcttagggtcacttaacattgtttttaaaaatgcatttggactttggtggaatcttcccttttaccaaaaggctttctttccaaattagagggtcttggctccaagggtggtaagctgctgcagagttggtgtcctcagacccaatgccaagtgtgcgaaacaagaaagaatatcaatacccagagatggacttgtggtcagagcagatggttggggagtgaggggaaagacaagaggcaggagtggggccaagaagtagaggcatcaggtccagggaggaacgccaccagactcaccagaagctttagtccatctctgtcattttaatgcactgctccctttgacatgtgaaagacattgaaggctatagtactgccaatggtatgatggggaagcctgaggcagctggaatgccaggagactcagacaaggcagctgaaggagccagcggctctgagatacagcaaagatgaaagaaatccatgcaatcctgggcaagccatttcctttgggcttcagtttccccatctgtaaaatggaaagactaggtagaaaacccctcaggtcccttcccaatataaactctacgagtctatgaaatgactatgcatccgagagctgatctgggaactaattattcaaagttatcaaaatcacccgcaccctcaggagctccacccctgaattgcattgagcaatctaatctaccactcacttcctccactgtgttctcaccaccacctccctttcataggtcacagctgctcttctggaggtgtcctacaggtgaaaagcccagcgacccagtaagtcttggaacacccacccttcccaccagctagaatgtctctgttctctgtttcccttgatacccagcctacatttatcctaagcatctctccccacccttggtgggcccctcaccctcaccccttggcctcttcattttctccctttggggctctccatccccaaaggaagaacttctgttcctcctccctcacaaccctctccaaccactcagggccacttgctgcccatgcttttcccttggcctggcagccttccaagactcagccagccctcctggcctgggctaggactgggtctgaggatgggccgaacactgttcgcttcccacttcccgacactaaatgcaatatttgtggattatatttatagagagaaagaatactggaactgtactaaaatgactcttttgttgttaaaaagattgccttagatgtttgagatcttgtaaatgtctctcgttctatagcattttcatgtaataaattagaattcatgccatcatctatggagtttccaaactaccatgagtcactaaggggctggcattttccctaagtcaaggaagctccctttttatcctggaatatatgactgtgtggtcagccggacccagccagttcaagggtgtttggtttatcatccctgcaagagctgtttctttcattctgggccaaagaaacggcaaaagaaaacaatgcataaaacatgaaagaatgtgagtggaccatatacaggttgatttaatgatatctcaagaacttagctttgctgggcacggtggcttacacctgtaatctcagcactttgggaggctaaggtgggcggatcacctgaggtcaggagttcgagaccagcccgaccaacatagtgaaaccccgtctctactaaaatacaaaaattggccgggtgcagtggcaggcgcctgtaatctcagctacttgggaagctgaggcaggagaatcacttgaacccgggaggtggaggttgcagtgagccgagatcacgccattgcactccagcctggcaacagagcgagactgcatcaaaaaaagaaaaaaagaaagaaaaagagaacttagcttacaaatatgtttaatagatgaggtgcactttttttaagaggaagggctatagactacaaataaggcaagtgtagtcctttatacctcactggaacagtggtttcaccacttctccaccctgtgatcgcaggctggttactgagcctccctgttaggtcagctgatcctccttgtgcctcagtcttctagaaacagggcctaattgtatctatttgtaatgagccatggagatcatgtacctgtgaggcacaaagcagacctcagatgtgtcatctccttcccttagtttgtccctctaactgccaagtcatcctctgtagagattggtaaactaaaaaacaacaccaacaacaaacacccctctccctaccctaggagctggaggtcactggcctgacctggttctccttgctgagttctctaccttctgtcctgacttgcatgctctccctctggaacctgaagctgacccataatgcctgggagcatgagctcacccatacacctccagcccacccccagcacagctgagcactggattatccacagtgaggatttacctgtgaaacatgctctgccactgctgcctgtgctgacatggcagtttctgcagcagcctcagtcctggcttctcacagccaatattcatacatacaaggccctgctctctaagagcacaagctctctgcacccaatatgccctacatctactctcaaagatgggtcttctgttgggtcatttgttcccttaagagcatctgtaatcatctgctcccagaagtgatccacccttgacctcttgacttcattggacataccctgggcctctcagcaaacttgctctcaaccatgggactgaggagctggtgacttctttcaggtcttgctgaccatactggtccagcaagctgtattcccagccctctcaatacctccccagccttctggccaggcagggccagaaatgagggattgcttataaattacgtaagacatacataaagtacaatgttaacttttttttttttttttttgagacggagtctcctctgtcgcccaggctggagtgcagtggcgccatctcggctcactgcaagcttcgcttcccgggttcacaccgttctcctgcctcagcctcccgagtagctgggaccacaggcgcccgccaccacgcccagctaattttttgtatttttagtagagacggggtttcactgcattagccaggatggtctcgatctcctgacctcatgatccgcccatctcggcctcccaaagtgctgggagccaccacgcccggcccaaatgttaacttttattgttgtgatctagtatagtacattacaactgattgaatcttctccatcagttgcctcggcatgctgggaaggcaatgtatctggcccctaactcttaaaagagaaactaaaaacttgtcaggaaggtgatggctaagaattccatcactcttgggggaaaagtggcattatttttccagttttgcttaatcttcttcagctttcttctttgctacatatgattgatgacaacagagacttcctttctgctaaaaagaaatcctccctgggacttttgttgttatttttgtaatatttgtatttgctttgcaaggccgtgtaccctttgattaatcttttttttaattaagacataagtcacataccccaaaagtcacccatttaaagtttttagcatattctacaaccattgccactaattccagaacacttttatcactcaaaagaaaaactccgtagtcattaacattcctctcccagctccccttgaccctggaaaccaccaatctactttctgtctctaccaattctacccatttgcctattttggtcatttcacatatatggaatcacacaataagaaaacttttgtgtctgccttttttcacctagactaacattttcaaggttcatccatgttgtattgtgtatcagtacctcattccttctcatggctgaataatattctgttgtacataatacagtcataagttgcttaacaatgcggatgcattctgagaaatatgtcatgtgaacatggtagagtatacgatgctatagcctactacacacatgggctatatggtagagtactgctcctaggctacaaacctactcagcatgttactgtactaaatactgtaggtaattataacacaatggtattcttatatataaacataggaaaagaacactaaaaatacagtattataatcttatgggaccactgtggtatttgtgatgtgtcattgaccaaaaagtctttcagttgctcatgactgttcctcaatttgtctgtccgttcatcagttgatggatatttggtttgtttccactttttggccttaatgatgaatgctactatgaacattagctttcaattctcttgggtgtatacctaggttggggtttgctggttcatgtggtaactctatgtttaacttttttgagcaactgctaagctgttttccaaagcagctgcaccatcttacattcccacctgcaatgtgggagagttctgacttttccacttcctcacccacattgttcttgggcatctttttctgagtgtgcccagcctggtgagtgtgaagtgggttctgggacctttaacttcctggtttttctctcacactgggttccattttgggggtagattacggacttggacatggttggtggtagggtggtcatcccttactctaaggcaatggccggagggtgatctattttgtggttcagaaagaagctaattagggagctggattgctttagttgactgctttgagaaactgggatttttttttttttttttttttttttttgaggcagagtctcgctctgttgcccaggctggagtgcagtgatgtgatttcggctcactgcaacctccacctcctgggttcaagcaattcttgtgcctcagcctcccaagtagctgggattacaggtgcacgtcaccatacctggctaatttttgtattattagtagagacagtgtttcaccatgttagccaggctgctctcaaactcctgacctcaagtgatctgccacctcagcctcccaaagtgctgggattacaggtgtgagccaccactgggataatatttttgaataactgcagcccaccctccacacccaggcttccccagagcaggatctgtgctgtccctgtggcaagggcagagccccaggagctagactaaatctgagaggaacaggggagtcaaggctagatggaggcacacacatgcaggacaggaagggtctccagcagggctggaaagccaccaagcaagggtagtgcaaaccctgtcttctctgcttcctgctgcccctctcttattgggtagcagactggctgtgtctgcttatcccgcatggtggcacatggctgcccagagctccccaaataacctgttacgtttccacccacagggagaatcaggcagcccgcttgcttattgtttttaatatacttttccaaactacacagacattcccaaagcgggtctccttctacccaaaagagaaacgctgggccttactaattaactgaagactctgctagctcgagccttccaaaactccatgccacaattgttcaaaccattttccagaatacatcttttaaaataacttttagaaaattgaacaaagggattcatgtctcagctttatagtcaaaccatgatcttttctgagggtatagcccatttggagttcctgcttaatcccctgattaaaaactgaatggggctgagtgcagtggctcatgcctatattcccagcactttgggagacagaggcaggagaattacttaaggtcaggagtttaagaccatcctgagcaacataacaagtccccatctctaagacaaaaaaaaaagaactgagtgacatctcacatctcacatttctgaacattaaacccagccttgatagccaaagatgctcgccactgaaggatccaggtagtattgagggttctgtggggattatccaaagagaactttctacaaagttttaggtgatggcgatgctaaaagaaatgctaagaatttctctcttatattaaagagaactatggtcctctcataaaatgtaccatttatcaccaaatttatctcataacctaagagctaccacttacaaatttgaagggaaaaattactacattgtaatactcaagccaacacaaagaatcctatcccagtttcttgagtggatgggcaagaatatggggaatttattatgcagtaaccttcatctctcttctataggtcaggatttaagtttacctcaaaaatggaagattttaacatggagagtgacagctttgaagatttctggaaaggtgaagatcttagtaattacagttacagctctaccctgcccccttttctactagatgccgccccatgtgaaccagaatccctggaaatcaacaagtattttgtggtcattatctatgccctggtattcctgctgagcctgctgggaaactccctcgtgatgctggtcatcttatacagcagggtcggccgctccgtcactgatgtctacctgctgaacctagccttggccgacctactctttgccctgaccttgcccatctgggccgcctccaaggtgaatggctggatttttggcacattcctgtgcaaggtggtctcactcctgaaggaagtcaacttctatagtggcatcctgctactggcctgcatcagtgtggaccgttacctggccattgtccatgccacacgcacactgacccagaagcgctacttggtcaaattcatatgtctcagcatctggggtctgtccttgctcctggccctgcctgtcttacttttccgaaggaccgtctactcatccaatgttagcccagcctgctatgaggacatgggcaacaatacagcaaactggcggatgctgttacggatcctgccccagtcctttggcttcatcgtgccactgctgatcatgctgttctgctacggattcaccctgcgtacgctgtttaaggcccacatggggcagaagcaccgggccatgcgggtcatctttgctgtcgtcctcatcttcctgctctgctggctgccctacaacctggtcctgctggcagacaccctcatgaggacccaggtgatccaggagacctgtgagcgccgcaatcacatcgaccgggctctggatgccaccgagattctgggcatccttcacagctgcctcaaccccctcatctacgccttcattggccagaagtttcgccatggactcctcaagattctagctatacatggcttgatcagcaaggactccctgcccaaagacagcaggccttcctttgttggctcttcttcagggcacacttccactactctctaagacctcctgcctaagtgcagccccgtggggttcctcccttctcttcacagtcacattccaagcctcatgtccactggttcttcttggtctcagtgtcaatgcagcccccattgtggtcacaggaagtagaggaggccacgttcttactagtttcccttgcatggtttagaaagcttgccctggtgcctcaccccttgccataattactatgtcatttgctggagctctgcccatcctgcccctgagcccatggcactctatgttctaagaagtgaaaatctacactccagtgagacagctctgcatactcattaggatggctagtatcaaaagaaagaaaatcaggctggccaacggggtgaaaccctgtctctactaaaaatacaaaaaaaaaaaaaaattagccgggcgtggtggtgagtgcctgtaatcacagctacttgggaggctgagatgggagaatcacttgaacccgggaggcagaggttgcagtgagccgagattgtgcccctgcactccagcctgagcgacagtgagactctgtctcagtccatgaagatgtagaggagaaactggaactctcgagcgttgctgggggggattgtaaaatggtgtgaccactgcagaagacagtatggcagctttcctcaaaacttcagacatagaattaacacatgatcctgcaattccacttataggaattgacccacaagaaatgaaagcagggacttgaacccatatttgtacaccaatattcatagcagcttattcacaagacccaaaaggcagaagcaacccaaatgttcatcaatgaatgaatgaatggctaagcaaaatgtgatatgtacctaacgaagtatccttcagcctgaaagaggaatgaagtactcatacatgttacaacacggacgaaccttgaaaactttatgctaagtgaaataagccagacatcaacagataaatagtttatgattccacctacatgaggtactgagagtgaacaaatttacagagacagaaagcagaacagtgattaccagggactgaggggaggggagcatgggaagtgacggtttaatgggcacagggtttatgtttaggatgttgaaaaagttctgcagataaacagtagtgatagttgtaccgcaatgtgacttaatgccactaaattgacacttaaaaatggtttaaatggtcaattttgttatgtatattttatatcaatttaaaaaaaaacctgagccccaaaaggtattttaatcaccaaggctgattaaaccaaggctagaaccacctgcctatattttttgttaaatgatttcattcaatatcttttttttaataaaccatttttacttgggtgttta

SEQ ID NO: 527 - DNA, 63336 bp, Homo sapiens
agaccggcgcgtgaggaacctaccggtaccggccgcgcgctggtagtcgccggtgtggctgcacctcaccaatcccgtgcgccgcggctgggccgtcggagagtgcgtgtgcttctctcctgcacgcggtgcttgggctcggccaggcggggtccgccgccagggtttgaggatgggggagtagctacaggaagcgaccccgcgatggcaaggtgggcatgggcccggggctagggctttgctggagccggtggtggcctgggccctccggtcagggaggggcggaatggctgagcgcctgaacctcccttcctgtgcgctcttaagacctggatattgtgttctcgctccccaccttcctcctccctgttattcacaccacccttcctctgcccagcgattccctctcagttacttacactttctccctaagtccgacctgagacttcagacaccagcaacacttaacagccctgttcccccgtgtcttcatctttacccctctcccctctcccactctgcagtgatggcaatgcgaaagcttgcgccttgcatttacctggcgcttccacctgcccggtagctcgggccacgggcagttcggccacacccacgctgagaacaacccctgggcgagaaacatcttatcccaaagtgttgattgagactatgccctctctttttctgatggttgttttcttgtttggatacttgttaatctctacatcattatatttttcaaaggtatatttttgtggaatgaaaaggaagtattagaaatgagctgaagaccattcacaggtaaagagaaaaatttttaaatatacatttaggattaaatgaaaaacagaaatgaggtgcgaggagcgttagatttttcaaagcattacgatctctttggaactaaaatatagtggttgaaatgtgatatgatgaagtaatgattgtttttgccctgcagagagtatgtctaaataaccgattcccttctctttttgtgttttgtttctacttacaccaaacatgaactttgcaataaaattacactggtaacttacaattgtttttctactatttttaaaaaatggcctctacttaaattcagtataagcaccttctgaggaaactccgggaagaagatcgactgctgtgtagattgtctattataacaatatatttcactgtcatttctggtagggttatatgagaagtaaaaaaccctatgtttccttctagtccctcccaaggacatttcctacaagtgaattctgctgaaaatgaaaattagacagctttaggaggtaaagaagtagctaaaaggaagaggtattacaggcaacgctataactgggtagaaagaggaagcacctgtagctcattgccacctttgtgttctgatgctcgtcagaggtcttttctcagtgtataaattgctgagggtgtgtgtgcaagctacttactaccactcatgaccttttttctgctatcttcagtgatttcacaaatctagctacatggatgtagaaagagtgaaaaatagaacctggggcattcacactgatttgccatttaatggagattgtattgctgaccatgttctgtgataaataaattgtgctattattgtttagttcaaaatgtattttaactgcctgcttttctttcttagattaatatttttggggacagatttgtgatgcttgattcacccttgaagtaatgtagacagaagttctcaaatttgcatattacatcaactggaaccagcagtgaatcttaatgttcacttaaatcagaacttgcataagaaagagaatgggagtctggttaaataaagatgactatatcagagacttgaaaaggatcattctctgttttctgatagtgtatatggccattttagtgggcacagatcaggatttttacagtttacttggagtgtccaaaactgcaagcagtagagaaataagacaagctttcaagaaattggcattgaagttacatcctgataaaaacccggtaggtaaacgtttgtttttaaaaatatttgattatatttttggtacattttgatatttatttaaattgctttaaatgatcaaatgcttaagaataatcatatgtcaaaattataattcaacttgtatgctagaaacaaaagcaccaaaatgttctggattatttaggatcccgtgaaggaatgtcagtaccaaaaattcagttccctcttaatttgtagacgattttccaacaattctattaaagacattaaccccaaaacaaacgataatatccgtgaagtagttgaagtagttttcttattaaagtaggttaagatcaagtgttttagaacaggaacaaaaatatttttttaaaactcagagggtatgacttgctaaaaatagaagtaatagctaataatagcatgttttaactttgactgttttcttctgtgtatgcacaagtccacaaaccagagttagaaagttttataaattaatacttcacagcagctgaatataatgccagtcataaatatttatgtacacattaatgtaaatctttcaaaactaaactcattttaatttttatggtgtttttgtaatttatttgattatttcttagtgagatttagcgttcatcattaacaagaagacatagttataattttctcttttctaggtagaagttttaaaataggattattttcattgcataaagctgagcaagagaaacaatatttctttaaatattgtttagttgattatcttttcctaagatccacattctatttaaggtttttatttttttttaatttttctttaaaatttcaaataatgatttttaagtttccatataaaagacagtagaccttctaccatccgagtattatttaaatgaaagcatccttcagaaacaaattttatgaagcacagtaacaaggaagaaacatttccgatccaattttggattgttttctttttttttttttttttttttttgagatagggtctcactctcttgcccagactggagtgcagtgacgccagcggcttcctgcaacttctgcatcacaggcttaagcaattcccctgcctcaccctcctgagtagctgggattacaggcgtgcgtcactactgcccagctagtttttgtgtttttagtagaaacggggcttcaccatgttggccaggctggtctcgatctcctgacctcaaatgatccaccctcctcagtctcccaaagtactgggatcgattttggggtgttttctgatactggcttttatgtaattagctgatagattggggcacatccttttttaattaagttgattttacctcaaatagaaaaataacctacaaatgtattgatttataattgttataggagtaaaaaatatttatgaaattaagagtttcaacaggcttattattttcagctgcattttttaggaagaataactcatggtctgataacgtctgtcaaccttttgaagagtcaattatttcattacttttcttacttttttttttttttttttgaagattatagtttcttaaaaaatacttcatttcaacccatggtaactcatgtcatgttgtattacccctccttatgttggtatatggtctcccagaagttactagattaattaaacctacatatatgttttgaagaaacttggattgtgtatctgaaataattgtattatatctaatattttttaacagaataacccaaatgcacatggcgattttttaaaaataaatagagcatatgaagtactcaaagatgaagatctacggaaaaagtatgacaaatatggagaaaagggacttgaggataatcaaggtggccagtatgaaagctggaactattatcgttatgattttggtaaggtgatacgatattacttatgaaatgtgttttatctgagtaaaagaaaagtgaattctgtttcaccacttagcttatatatttaagatgcgtcactttgattagctccttttaatttgctgtgggagtgaaatttaaaaggaatgtcagttggtatacagagatgatctgtacagatatgaagttgtattggttaaatcttgttaaatacttttaaaataaggattgctatttaataaaaaatatgcattcatggactgcataatgacatttcacttaacaatggattgtatgtaggacattggtcccatgaaattataataccatatttttactgtaccttttctatatttaaatacaaagatacttagcattgtgttacagttgcctatggtattcagcagtaacatgctgtacagatttgtagactaggtgtgtagtaagctatactatctaggtttgtgtaagtacactctgtgatgtttttgcaacaacaaaattccctaacaacacatttctcagaatgtgtcccattagtaagtgatgtatgactatatgtttgcattaggggtagctaaatatttctttcagtattttttagtattgaataatattaatttctttcaatatattttagagcatcatattgtccaagaaaggcgaaacttcaagtttagtaatgatctcttcaatagaaatgccgtccttctcatatggaacccttactgatttttaaggtgttttggccttcggttgacattaaggtcaataccttgaaacattatcaataaaggttccatatgagaaggacgaaaggtgttttttttcttaaacatggaggaaaaaataaggtggaaggaggaaacaaagtaaaggaactaaggaagagagattgtaaacacacaggtatcaagggaggaaggtgtgttcagagacccagtgtttctcctagtcattaattaacctcaaatgcaggctaagaactgaatatgcttctgtattagactaaatgaagtattttaaatttatatctggaggatttgcttttagtaaatatgattttttttcaaaatagtattttcaagtatattctctacaccttgatagtctatatcaagagttagcagactgcatttcataggccaaatctggcttgccatttgcttttataaataagttttattggaatggaattactttaatttgtttacataatatatgtgacttctttcacacttcaagagcagagttgagaagttgtgatagaagccatacatcccacaaagcctaaaaaatgtatatttactaaatatttgtgtctgcctctgcaaatactctaagctttttagcagaagatattctaacatgataccatgtgttaaaaaccatataatctgaaaatcaaatgaggtctgtagtctagttaacagtgtaccactctcaatttcctggttttcgatattgtgctatatagctacataacatgtcaccattagaggaaggtgagtaaaaagtatacaagagtctatatttttgcaccttcctgaatctgtaattatttttaaaaccataatataaattttatatggaggtaaaattatgtgaatattacgaactaccgcatacacatctatgagagtccatatcagaattctaatatctttagatcaccctaaatgtactgatagtattatttacttttttttcacttaggatgttgcatattctctaagtttgagatataatatagtagtttgatttttttgatgattaaaacgagtaatctatttttatgttgcaatttatatggtgaagttttgattttataatttttatatacttttaaaattaggtatttatgatgatgatcctgaaatcataacattggaaagaagagaatttggtaagtttgtgggcttaaggttttataaaactaatacaagttcgatctcatctaaaactctaggggatatatatgtttgaaatttagaaatcttttggagtttcgaacagtaataatgtaatatactgtatcttaaatatttctagcagaatgtggggaagtgtaccataataaaaacattaatatttatgtagcaaaatgtgtaagtatatatactaaataaaagaaatttaaaaatcagttcagatcaggtttggatgccaagtgagcttgctgcaaacttacagcaaaacttctcagagctttttgattttagagttttggataaaggtatagttattttggaagtagatttaatttgattggcaactttgtgtgaaaatggccataaaaatacagttctgcattttccattgcattttagaaaattgtataccagaatagattcttatactttcatcctttgtacagtaataataggtttattttttctatttcagagcaataaattaaacttcaaatcaaatttcaattttatattgctctatcacaattgtatttaatttagaaaactaaaatacagccaggcgcggtggctcacacctgtataatcccagcactttgggaggccaaggcaggcagatcgcttgagatcaggagttagaaaccagcctggccaacatggggaaaaccctctctactaaaaatacaaaaattaggtgtgcctggtggcacgcacctgtaatcccagctacttgggaggctgacgcacaagaatcgcgtgaatctgggaggctgatattgcagtgagccatgatggcaccacaaaaaaaaagaaaactaaaatagcgtaccagtcgcaaaaaatacatataaatctatatgtttttcatatattatcgttaaaaatttattacagctacttgattttatacagtttgttccttctaagcaagggtggcttttttttttttttttttttgagacggagtcttgctttgtcacccagaccagtgtgcagtggcacgatcttggctcactgcaacctctgccccctgggttcaagcgattctcctgcctcagccttctgaatagctgggattacaggtgcccgctaccacacccagttaatttttgtatttgtatttttagtagagacaggatttcaccatgttggccaggctgatctcgaactcctgacctcaggcgatccacccacgttggcctcccaaagtgccaggattacaggcatgagccaccacatctggccaagggtggcattttaatcttattttctacatcatgctggtgagcttcacatacaaaatagctgttcaatgtgttactttgttaaaagccttctaggtgaacacttgaacatgttctaagtgaatagaaaatacatctttcctgtgttctgcaaataagacaatttgattcatttggattgttaatagaattaatgctcatgtcacaagctggtagaatcataactctcgtgtgagttatataaacctatagctgttcctgtgtggtttttattgtctctcatctcctaatatatcagtaagtgttttgtgtaccaatggttcagaaaacatcggaattacagatagaggaactgaacaaaacttgcaagcttactaatccatgagtctacctagaatgagacttcactgatagttatattgtatatgggttcacactttttcagatgtgtcactatgcagaaaagcttaagaactgttaatagttcatatagaaccccaaatggtagttcaagataaattgcagccacaaaacttcagagataattcataaataattaaccttgcttgatgagaggaatgagcaggagcattgttgtgatagagaaggaccctctagtgaagctttcccaggcatttttctgctaagcagatgttatcatttctggctctctagaaagtcaacaagcaaatgccttctaagctcttctattatatgcagcataggttaagtaggtttaatcaattctgacagctactgtaaactctgaaagaataaaataagagacctacataatacagtaaggattgcggggattaaatttaatataagccctaaataagacattaccttggaaaatcactttatttgaaaagattgacttttttttaacaattcaaaacattaatacatacttgctaaaattatagatttgaacatgtgatatctagccaatagtgcagtttatattttatctgtaaaatgacctgatgcaaattacaaattttactcacttaaaaaatttaacattgtaaaaatgtgctttcacattcaagataaaaaggcgagggtaatctgcttttggttaaaggatttccatatgattccatgttaaaattagttaatattttaaaataaaaatttcagaaattacagtaagacattaaaacatgcatggtattctaaatacgtgcaactaattcaggctaattagaaacaggtacaggactcagtgttcacctacatttcaagtataagatagacctgtggggaaaaagttaatctgtaccttacaggcaaagtaattacattttactttgctaatagaagctgttaactggagttgtatgtatattaacagacagtagctgtagttgtatagtttagaagtggaaagttgcattttgaaatgtaataattctattctgggtcactgttaggcacaacatcccattgagctgtgatgatacagtatttaaaatattttaactttattcttattactcagcaatcagtgggaacttggcaaatatgagaagtgctcgatgaagacaaagtacaggtgtacctcattttattacactttgatttattgcacttcatagataatgcacttttttttccttaacaaattgaaggtttttagcaaccctacatcaagcgagtctatcagctgaacgtgtttccaatagcatgtgctcatttcatgtctctttctcacattttggtatccaaactttttcattattattctgtctgttacagtgatctacagtcagtgatctttgatgttactattgtaatcattttggagtgtgcccataggatggcatacttaatttttgtgtctattctgactgctccctcttccttctcccttttctctcccacttcttgggcctccctactccctgagatacaacattactgaaattaagccaattaataactacagtgacctcttaagtgttgaagtggaagagatgcacatctctcattttaaatcagaagctagaaatgattaagcttagtgagggaggcatatcaaaacccaagacaggctaaaaggtagacctcttttgctagttaaattataaatgcaaaggaaaagttcttcatggaaagtaaacgtgctactccagtgaacacactaatgataacacaaaacagccatactgctaacatagagaatgtcttagtggtctgggtagatcaaattatctacaacatccccttagcgaaagcctaaccagagaaagaccctaattcttttcaattttatggaggcttagagagatgaagaagctgcagaaaaaagtttgaagctagaaaaggttggttcatgaggtttaaagaaaacagccatctccataacatcaaaatacaagatgaagcagcaagtcccgacatagaagctgcagcaagttttccagaagatctagctaagatcattgatgaaggtggctatactaaacaacaaattctcaatgttaatgagacagccttccattggaagaagatgctatctgggacttttttttcatgcctgctaacaccatatccattctgcagcccgtaaatcaaggagtaatttcaacttcaagtcatattatctaagaaatacatttcataaggctctacctgccataggtagtgattcctctgatggatccaggcaaagtaaattggaaaccttctggaaaggagtcaccattctagtgtcattaagaacatctgtgattcatggaaggaggtcaaaatatcagtgttacaggagttgggaagaagttcattccaaccttcatggatgactttgaggtgttcaaggcttcaatggaggatgtaactgtagatgtgatagaaatagcaagagaactggaattagaagtggagcctgattatgtgactgaattgctgcaatctcattataatgatctcattataatataattatctcattataataatctcaccatggggcggtgaggagttgttccttatggatgagcagagaaagtgatttcctgagatggaacctactcctggtgaagatcctgtaaacaatgttgatatgacaacaaaggatttagaatattacataaacttggttgataaaacagcagcagggtttgaggccagttttgactccaattttgaaagaagttctactgtgggtcagatgccatcaaacagcatttcacgcttcagagaaaatctttcaggaaaggagacatcaatcagtgtggcaaacttcattgtcatctcattttaagaaattgccacagccaccccaaccttacacaaccaccaccctgatcagtcagcacccatcaacatcacgacatgcatgacttgctgaaaggctgaaatgactgttagcattttttaccaataaagttattttttgttccttggttggtttgtcaccccacctggagagtgcagcagcaggatcatagctcatcacagccttgaactcctgggctcaagcaatcctgctgcctcagtctcccgactagctgagactgcgggcatgtgccaccatgtccagctatttttatagagacagggtcttgctgtgtttcccaggctggtctcaaactcctgggctcaagtgatcctcctgtctcagcctcccaaaaggctagatgacaagcatgagccactgcgcccagcctattttctaattaaggtatgtacattgttttgtttgttttttttttttagacataatgctattacataatacactgtatatagtgtaaatataacttttatatgcactggaaaaccagaaaatttgtgtgactcctttatagtgatacttgctatgttgtgatttggaaacaaacccacaatatctgaggtatgcctgttaccagggtaggagacatttttactacaagaaaggttttgtgtcaaataccattcaaatttgttttacagcatatttttatttaagacttatgaacagtaataccttgtgtaattattgctttctatttttatataaaaataactacctcattacttgtttatagctgataagataatcccttctttcattaaagtttgcattaattctgttaatatttttacctaaatttgtactggtttgtggtctaaaccaatatggcaattttttcgaccacctctatagaatggtcatttgccagactttgaaaacattgccaaagaacagcccatagtcctgaattacacactttgcctgtaatgtgtagattaactgttttcccacaggtctgtcttatacttgaaatgtaggtgaacactgagtcctgcacctgtttctaattagcctgaattagttgcacgtatttagaataccatgtgtgatttaatgtcttactgtaatttctgaaatttttattttaaaataataaattttaacatggaattatatggaaatcctttaaccaaaagcagattaacctcgcctttttatcttgaatgtgaaagcacatttttacaatgttaaattttttaagtgagtaaaatttgtaatttgcatcaggtcattttacagataaaatataaaatgtactattggctagatattatatgttgttcaaatctgtaattttagcaaatatgtattaatgttttgaattgttaaaaacctcaaccttttcaaacaaaatgattttccaaggtaatgtcttgtttagggcttagattaaatttaatccccgcaatccttactgtattatgtaggtctcttattttattctttcagagtttacagtagctgtcagaattgactaaacctacttaacctgtgctgcatgtaatagaagagcttaaatctcagtcactcttactatttgtcttctttatttctctcatgcacacaaactcttacgtgaggtttggctgctatttcttgtgccgtcactttttacaactttatggccatatttatcttgcagtttgaggctgcttctttttcaagtatgggcgtaggagagtttttttaaaaagctattgttggtttgacatttgaaatgtttcttgtggaaaaaaaatttttaattttttaaaaatgtcatttatgtagaagatatagaaaaacatcacacagaaaatgagaaagacaatatgaaaattgcatgactttttaaaattctgatctccacaaaaagtttttaactaaaatatgcatgaacctttaataaataattctaagttgtttgcattttatgtatttttagatgctgctgttaattctggagaactgtggtttgtaaatttttactccccaggctgttcacactgccatgatttagctcccacagtatgtatttttcacatcctcattactagttttatttctaattgatctgcaatttatatgttagaatttttttttctatgaatagtaatcaaaaataattatcaaatactttaaatgtctggtttaaaaatatatagcttggagtgtgttcaagggaagaaaagtggtcttatcagagaaatatgttttctttttctgtcatagtggagagactttgctaaagaagtggatgggttacttcgaattggagctgttaactgtggtgatgatagaatgctttgccgaatgaaaggagtcaacagctatcccagcctcttcatttttcggtctggaatggtaagggataaagttagcattttttaaatttgtgaaacattatgacaagttaaatagtagagaaaataacagtatgtagaatttgcagaacattttaagtcttgttttacaaggtgccatctcactagtcttctgtaataataaacattttggattatgaatttttttttttgagatggagtctcactctgttgcccaggctggagtgcaagggtgcagtctcggctcactgcaacctctgcctcctgggctcaagcagttctcctgcctcagcctcccgagtagctgggactacaggcacccgctcccatgtctggctaatttttgtatttttagtagagacggggtttcgccatgttggccaggctggtcttgaactcctgaccttaggtgatctgcccacctcagcctcccacagtgctgggattacaggcgtgagccacagtgcctggcaaaaaaaacaccattgactttgctatattttaaaattaaatgtttgccaatttcagtttctgtcttaaggaacataatttatacaatatgtatattgtatttggtagtttacaaagtattttacaagtgttgtctcattgaatgtaaagctctgatatcttttttcttagtttccagtgaggaacctgaacgattataaatggtattattaaaatgtgttccatagaatctgtactgtcaagattatcaggatatcatttggaaatacattctgctattgagaaatagagctttgctgcattattcaagataatgtaaaaatcaaactctttggtattatttttattgagttttaaaaagaaaaagtaaaagatgtttctcttcttacaaaaaccaataggccccagtgaaatatcatggagacagatcaaaggagagtttagtgagttttgcaatgcagcatgttagaagtacagtgacagaactttggacaggtaattttattttcttaatttgcttgattttcagggtattttgaaatcagtattttgtttttaatggcaatattaacattttggtcatggtattgaaattttaaagtgtcttttccatgtttcttagaagggaattgtgtcatttactctgaactctgctgaatttaacaaactagttaaatttttacagaaacttgaactatcgagatatgggaaatggatatgagatagggctacggtaaaaaaggcatctctcaaagtgcaaaaaatgttttgtaatacaagtgttttattgcttttttaaatatgcttatcaatcagtaaattcaaacctattctgtttaattttaaagtttaaaaatgcttctaatcttaggcttttaactcattaactgcctttaggcagattaagctaataatagtatttgtggctcaagatgttcattttattcattgagtaaagttacgtgtcagaaactattaaatagtggggctgcagtaataaaatatatagtccctgccatcagtgacttcattagtgaggaaaacattagtaaacaattaaaatgcaatataggtactattattatagagcttaagggagcataagatgtgtaaaacaacccagttggggaaaagagaaagagttagaaaatacttcttgaaagaagtcatatccaatctgtcatgaaaatgaataggaagccttaggagatcactgtgtatttggggaactggcaatacttcatgaatctgacaaaaagatcaataattgggtcaagtggtgtggggaaatataatatagctggctaaataggtaggcaaagctcaagtcacaggggcctaacttgccaatttgagtttttttcttaatgaaataatgaatttaggttttatatgatgaaaaaattggagagccattgaaggaatttgtcatactcaagagtatctttggaaagataactggtaaaactcagagtggattagaagagggtgagattagaaaggaaaaattacttagaagactgtttccattagtaaaggagtaataggtgatcagaatttgctttttttcttttatttttaaggaaattttgtcaactccatacaaactgcttttgctgctggtattggctggctgatcactttttgttcaaaaggaggaggtaatactattttttaattttgttggaatgagaacatgacatttaaatttttggtgacagttttaagtatgctactgtaattgattattaagtactagaaactacaatttatgcccaggattacaatttttttacttaatgaatattcgcctttttcattattttacacatgaggttattattcattttttaatgtatcctctatgtttttatgttcagtggaccagtttttcagcttagactcatgataaattgtaccttcagatagccacagatgttatttgacaatttgcaaaaataactagttgtttacagctctaacccctcccaaaataataattttttggaaatatggactttgcttcatgcttatatatatctctcaaacatacatagatttgcctcatacaattatatacttgaagatgacagcttcttctaggaacctttccttgaataaattaagttgaaaattcagtactctgcatagcaagccgtaaactgtaaactgtgttcaagcaatgtggttggttaaaaattgttctaagacaacaaaatattataactcaatgtatttgcatgtatttaatcccaacatgagtcttctccccacatttcatctctcagccttcatgctgctatattgaaaaggtactgccttgtaactaaaatcaacccattaccccatcctgtaaggcctatgctagaaagacactgccttgcagcaaaacgtcagccttaaacttaactaatcaccaagggattttgtctcattttggcctattgcccaaatttctgttcatccacacatgaacaaaagttcttacattctctgagattcttttacttctcacctcaagtaaattgcttctccctgtctttgtaggctctgtgatgctatagctctctttcttctaaatcttctctcattgtattctagtgttcatatttgcagaactttcataaaaatagtgaaggcactatttaaagattttattgtattttgaggatcctttatatacttctatcaaatatctattacattttatttccccccaattttgagatctcttggataaaatggattgttgataggaggagagattgagagtattaacctaaagagagaaaattactttttctctgtagctagacatcctagaaattaaagggagagaatgaaagaaagagggagcgagggagtgtgtgtgtgtttttgtgtgtgtgtttgtatgtgtgtgtgtgtagaaggatttccatatctatcaatagagtccagctcaattaattgccttcgaatgaacatggtaatttgggggaaaggcaaatgcaagtattttcatcaggcttaataaaggtaaaactgcctcataaggtttttttgtccccagattgtttgacttcacagacacgactcaggcttagtggcatgttggtaagcatcaatcattttgtaaaactatatcaccatgtaaagaaacacatttagaaattgatttgaaacattttcttcccttatttcttgaacatttaactcacctatttgtaatcttattttctgatgactgtattcatagctatgtgttttttcctgaataattagttacgttcaataaattttaacgtggtatcaattctaagtgtcatttactttgtaagtattctgtaatttataagttcctcttcaactgaagttacatgttagtgtttttgtcatttcccaactttatcttttgttgttttcttttttagtcatttttaaatgtatatagctctcatgttatggctgggaagtagcctgagtgatgttgattttttaacaccattgaaataccctttgtggctttgtggcttgacaaagccacacaaattgtcagttttgaaaattttggaaattctttgtgagcttgaatataataatgttatgttaggtgtaatatatgttaggtgtagtattacatttattagatcagatttattaatcatgttatttgtttttggactacatgatctataatttctaagagggatgtattaaaatctctaccatccatcattgatttatctatttcttatatttctgtcagttcttcctttacatattttgacattatattgttggcagcagtatgatcattatatcctttggcggctatttatttctctttgtgcattatggatttgtttacacaaattctgttttatttgatattaaaatcactaacttagtatgcttttgtttcattccctttcttatttcaccctatgcctaggcctttagtttttcagcactacacattaaaatcacctgaggagcttttaaaaataataaaaaaacaaaaccatgtcccccagaccaattaaatcaaaatattcgagggtgaggactgagcattagtatctttattttttttttaatatttggtgatcagagtgattggcctatatttttcctttccagtaaagtctgtgcacttttagcatcaaagttaggctggcctttaaatgtgttggaaagtattatctctttttctcttctttggaaacagtttctgtacaactgttgttatttctttctcaatttttttttttttttggtagaatttatcagaaaaccatctgggcctgaagttgtctttgaatccatatttatagacttttctccaatctctctcagatagatagatagatagatagatagatagatagatagatagatagattttctacttcctctatttggtaaattctgtttttctaagacttcgttctttgaagcaaatgtgtaaatgtattgctataaaattgtacataatatcctatttttttatatctgtagtatctatagtgatgttctttcttactttctgatcatattttgtgtgtgtgtctcatgtctgtttttattcttattctgtccaaggagaggtttcttaacctttataagtcttttcaaagtctcaagtttcagctttattgatttttttttttttactgccagtttcttgatttcattgacttaagcactatatttccttccctctacttttttatgatttaatttgctgttcttgaatgattagttcattgatcttaggctttcctttctaatatatgaatttagattataaattagtgactacagctttagatacatcttctattttgatatatatatatagtattttgattatcagtttaaaatattttttaatcttgatttttatttctctttgaatcacagattctatattttttgttcctaatcataaaggttatttttaaaagtaattttgttatttttggctagcttgattctactgtggataatgaacatggaatcagtttttttaagttgttaagccttgtttcatggcccaacatatggtaaatttttataaatgtttcatatgcatttgaaaatgaatcctgtaattcacaggtacacatttctataaaatcagttgggtccaatttgttagctatgttaatcagatcctctagatcttaataattttattgtctgcctattctatcaataactgagagagtgtcttaatatcctccactactttgtggatatttctatttcctttgtttctgtcaatttttattatctattttgatgctttgttattagatggatattaatttagaattgtatgttttcttggtgatttgaatctctaacctgatgaaataaccctctttatctcctttcgtgccttttgcctccaagtctaccttgactgataactaatatagctacaccagctttcttttgtttaatgttggcatttttccattttttactgtcacccttactgtatccttatatttattgcctgcaatcagcatgtaattaggttttgtatttatctagttgctattttttatcttagtccatttacatttaatgttattcttgatatatttggccctatgcttaccatcttgttagttttatatttgtcctacctgttttatagtccttttttctttcctttttgcttcttttggattaagcaagtgatttttaaaatttcatttcccatctctactagctctttggttacctgtccttttattgttcatttaatgggtaccctagaaattttgtacatgtatcctgacttactcatttgctacctaacgcaagagtactaaacagaaattattttactacctctgaaactttgctgttatgtattctaatcaaatatgtttttttctaagttctgtcttaaatgcagtaaagtgaatacatcttaaatgtacaacttaatttttacatatatatgctcccatgtaacaccacctagatcaagatctattctttcttagcttttaattgtttgtgattttctgaagtttcattatgatatacataggtcttgagtttcttatttattctgattgagattaactggacttcttgatcactgtaggttaatatctttcatcagttgtggaaacctgtcagctggtatttcactttttgtttctatctcattctcccttatctttccgagatcccagttgaatgtatgttagaactctatttgtttactaacttgcccagtgcagaaatttttttcagtaacttaaggttatgagaaatgtacttttcgtacaggatttttggagctcactaaaggattagcttagccactgtagatgaaaactgggaagatactaatttaaatgcacattgtagacacatacagagaatgtctcataaactgtataattactaaaaggatagccacaatgaaaaatcttaaacagtagtttggtttattttctttaacctgaaagactattggacagctcactttctataaaaattgtaaatgtcgttttttgtggattcgtagaaagaattataaaaagtagatttctactattagggaaaaaccatttctcaagttactaagtacaattttttgcacttaatatttctaaatttattaagtaatttataatattagaaatctactttttaactttgctgtagaactaaggcatgaagttttaattttttggtagaaaaattgtgtttttagctaagtaaagctctaaatccctttaactttttgcctcccatttacaacatggtttgttgtttctttccattttaggatggtcttgttaatgtaggatggatggactgtgccacccaggataacctttgtaaaagcttagatattacaacaagtactactgcttattttcctcctggagccactttaaataacaaagagaaaaacagtattttggtatgaatcactttaaactaatttatttacatataatgtgcaaacaccctcaaaaataatacattatttttgtaagcagtgagcaaagaaatgaacaatttatattgtctgattgtggaacccttatttagaacacatacttaatttctgagattctttttaatacatgcttcaaattataaaatttaaggattatttttaaactgacgattacatttcatttaaagtcattacatctttacatttaaaattaccttacatttaaaaccattatatttttaaaccccaaaagtatggagtacattcctgggttatacgaaagagcatttatagcatgagttttcattgttttctatttaattgtttattttgttttttttgagatggaatctcactcttgtcgcccaggctgtagtgcagtggcgtgatctcggctcggtgcaacctctgcctcctgggttcaagtgattcttctgcctcagcctcctgagtacctgggattacaggcgcctgccatcatgcctggctaatttttgtacttttagtagagacggggtttcgccatgttggccaggctggtcttgaactcctgacctcagatgatccgcccatctcggcctcccagagagctgggattacaggcgtgagtcaccgcacctaacctaattgtttattttctaatgttaaaaatatagatcagtggtagttttggctggggcctaagtatttttctaaagcaccccgtgggattctggtgtaaactcagttttgacatcttgtaatgtggtatacctccttaagtttgagtgaggaaactgaagctcaatctagttgtcaaggagctaagataaatagtgggatattggatgggtcactacggaatcccaaaagaaagtaaggactgtgataagacaaatctcccttagttttccctctgtactttaattctgcttttttagatgttgataaagataacatatactcatttcagaaattcatatatggcacagagctgtaaaagaagatgcaaaattccctaaaaccaaatcactaatagacagccaccatcaaatcttggtaaatacccatccagatctctactgaaatatatatgcaattacgactttgtgccagcaattctctagtttatacctgtgactcaaacctctgttctccactccagatgtattatacacatgcacctatacgtatatgtgtggatgtgtgtgtgtgcttgtgtatgtatatgtgtgtgtgtacatacttacatatcactgctcattcaatatcttccttaggatattagtcagtgtctcaaatttaaatgcctataaccatattcccaatatccctccataaatctgcttcatccagttttttcccatattatttgatgaaaactctgtcctttattattcaagccaaatgccctggagttattcttgatttctctttttctcataccttataaccaattcatcaagaaaatctatggctttatctttaaaatgtgtttatacacatcaaatggatggatggatacagatacgtaatttttcataaatgggattgcatagtagattctattttgtaatctagttttttcactcagtgtatcaggaagatgctttcttatttaaaaaatgtacattttatatgcatactttatcattttataaatgaatatgtatacattatccttgaagtaattaatgatccctggatggtaagtcactgactagatgtgacatacttagtttaatcagttctttcttggtgtgtgtttctactttctcaagatgataagcagtgttgtaatgagcaatcttgtatctttatccttgtgcactttttcagttatctgtttagaatgggagcattgtggccattttaaactcaattggtattgccagattgccctccggaaaagttgtactagtttattctgtgccatccgtcaacaaggattgcctacaccctgtccaacaatagagcctcttgccttgagtattataatctctgggcttcatgatagaaaattacaaggtcaaaggctgtctgagacaggaaacagaaatgagtgactctggaaatgtaataacagggagtggtgaattaaacattacttgtccctccccaaaagcagtcaggttttttttggtttttttttttgagacggagtcttgttctgtcgcccaggctggagtgcagtggtgcgatctccactcactgcaagctccacctcccgggttcacaccattctcctgcctcagcctcccgagtagctgggactacaggtgcacgccgccacacccagctaattttttgtatttttggtagagacggggtttcaccgtgttagccaggatggtctcgatctcctgaccttgtgatctgccggcctcggcctcccaaagtgttgggattacaggcgtgagccaccgcacctggccgcattcaggttttaaaaaatataaaacagtatgccagctaaatatatctggtaggtggaattcagaggctagataagacagcagtcctttataggtgtaactaacaaattctcctctaacagaaacaggtttataatgagattctagtagattaagcactgcaagtttatataggctgtgtaataggcattttagtaaaagtcttcatagtgaataggactaaagtgaataagatgtagaactgaggcgtgaaagatttgttatggcattttaagctctttgatagcaggaactatttcatatagacctctaagaatgtttatgatatatatatatatatagtatatatcatatatatttatatatatttatatatataatatctcatatatatttatatatatatatatctcatatatatatattcagttttaagaaaagaatcttagggaaaaaacctgaatttttattcttatgttgtacctattatttttagccatatgtttgttctcatgtctagcatgattaaactgtggattccatgattgttcgtacaagtttttagtgaattttagatctttcaagtaatacttaaactgttaaacatagatggttcataattaaagacatatattaaactctgttttgtcaactttcatatacattttcttgatgtaaccattgctgcattctttataataacagctgcttcattgagagaatcagaccagcagagagagagagttatatgacaaaatatgctgaggataaaatattgacaaataaagaagatttgttagaagggccttttatactcgtttgtgttttaaataagagactcgggccgaaaacaagtttaagataagatctgtatcattgtattttactctaaaaactcctaagtggtttggtttttagatgaaaacctctataatgagcaaaagtccattccaattttccacttctaagttcctcttaattaatcttaattattggttggggaatgaagtgtctttgatagtctattattcttccttctagtgttataaaaattcttaagtgaatgtgtaaaacattggcattctgtaaaacatgattagcattaaaattaagctaaagataatgtggtttttcttgatgattgggaggtcactcaggatttttctgagcatttttatagaatacacatcatagttaattaaaaattccagttaatgcaacatcttataatggaatttattgtatatcactatttaagaaacagcttagttatataatatttttgataattgccaaaatacactttttttgaaaaaagacatttggaattgtttgaaaaactatttaccttctataatcattttcctaaaaatactacattggaaattgaaaaaacaaaagatatcaaatataatgaatatttattcaaaaagattacaatgtgattttctttttctagtttctcaactcattggatgctaaagaaatatatttggaagtaatacataatcttccagattttgaactactttcggcaaacacactagaggtaatgtttttattaataatgataagtagcaatgaatgttcgtaacatttcaggtcttaacattttaaaattagcatttgttttattcatctctagagagaattgaaagtagcagtttcaaaggattatatattagtcaattgtaggttaaattctaattggatatctggtgttgctaattcaggatggatctgtagttctggaaaacctactcagtcctgaaggtgggcttcaaaaggaacatcagaaaaggcagaattttaatcagagcaactttgggtctgattcataactttttgttcttgcttacagaacggattatattgattactaagaagaagtattcagtttatggatagaatgctgagaaatattgcttgtggtagaatcagttttttttcctattaggttggtgcaaaagtaattgcagtttttgccatttgaaagtagtggcaaaaaccacagttacttttgcacaaaaccaaatacttcctaaccacagatcttttgaagtctgtatcactacgagatcttatgtgctaagcctgaaaaagctgacaactttgccacccaactttttagctatatgctgttaaaatcatgtatttgtttttggcagtcatctactttaagattttataatttagtgactaaccctcctgtaatatttgttgattttacatagcattattctaagtaaactacaaaataagagaatgagtgggtccgaattttagacagtattttgaaataatgggtaggggagctaaaactaacttcaagtcatagaaatgaagattagaacccttagaatttcccatctctgacattttgttttctttatcacttttaaggatcgtttggctcatcatcggtggctgttattttttcattttggaaaaaatgaaaattcaaatgatcctgagctgaaaaaactaaaaactctacttaaaaatgatcatattcaagtaagaaaaatgtattctgcctagccttctgctggtgtactttgttgttaatttaatgcatataattaaattttaaataacataaaaactcttatttgaaattataagaagcctataagtgcttttagtcttggtttgtgcttgcttttcctcttttttattaaaagtttatatgtaatctgaaagtggttaattttcacttattttggcatttgataaacctgtatcatacaatttttctggaatgcatactgtaggaggttatctttccattttttaaattcttatttctttatataagtaattcttggtcgttgtttaaaaatcaggacaataaataagtacaaaaataaagcaattatctaaaaaaatcacccatactcttaacattgttcataaccctgctatgtatttactctatataaccatttaaacattttgtgagtgcccatatgcatatgtaggcatatgtatatgtgtgcacatgcatacatattgtaatggccattgtaatagacatacacgtgtaaatttatatgtctgtgttttaatcaaaatggattcactgtatgcttttttttttaacttctgtcatacaacaatatcataaactttttcacagacctgtaaaaatgcatatatatttatatggatataaaatctctatatccatgtacacatgtatatcctccttattccctaaaggctacatagtggcttactatatggttatgccataattgtttaggaaatcctctcttactgattttatgttgtttcctttattttttatatcaaacgatgcagaacttgtctttaatatgggaaattttcttctcttttcttttgagacagagtcattctgtcacccaggctggagttcagtggcgtgctcttgactcactgcaacctcagcctcatgggttcaagtgattctgggttccagtgattccctccagagtagctgggactacaggcgcatgccaccaagtccggctaatttttgtacttttaacagagactggatttctccatattggccaagctggcctcgaactcctgacctcaggtgatccacccacctcagcctcccaaagtgctgggattacaggcgtgagccaccacacctggccacatgggaaattttcaactcaaggttatgttttcttaaatggtttttattctcattactagagtcctccagaaagttttatcagtttataatctcactgacagcacgtgagtggccatttctccacgctgtgcccaccatggtactatcgttctttataatcttcacaattccgataggccacaagtgatatgttaacaatattcactttcatttaattgctttcaactggtcggggaaaaatactttttcatgattattaacaaatcataattgttctctagttaattttctctttatatctgtggcccattttcttttttctgatgggatgtttgtccagctttttctttgtttttttttctttttttttaatgcagtgtagtgtcactctgtcagccaggctggagtgcagtggtgcgatctcggctcactgcaacctccgcctcctggattcaagcagttctgctgcctcagcctcccaagtagctgggactacaggtgcaagccaccatgcctggctaatttttgtatttttagtagagacgtggtttcaccctattggtcaggctgatctcaaactcctgacctcaggcaattcagctacctcagcctccccaagtgctgggattataggcatgagccaatgcgcctggcccttcttgtttcttaatggatcttctctcttaaatgccacagatttgttcctggtttatatttggctgttgtgcttacgctcttctttttcacactctttgaaaacatcacttttttcttcattatttctgcttctgaaagtgatctctcctctatctcaagattatataaacattctctacatcttcaaaaagtaggtttctggaataacttcatattttcttgggaattcctcaggttttttttaactctctaggaagcatttttttaactaaattgagtcttaatattaaatgtaaatgaattatttctgtctcttattttcgtagcctattagcttctgtttaaaaactgtgtcattagggcagtgccatttttggattatcatgaatatttacaaatcaaatgggtaagacagtgtttttatcaaatttgacctttttctcctttaggttggcaggtttgactgttcctctgcaccagacatctgtagtaatctgtatgtttttcagccgtctctagcagtatttaaaggacaaggaaccaaagaatatgaaattcatcatggtaagaatggaaaaaaatgataaaaaaaaacttagcttcattttcaaatagaagttttctaattgtgctttttaaacttattttttacggacatgcttattgtaaataacttttctcagtaaatatgaggacagatattttgaattatatgtagtcactttattctctttacccttctttttaacatgaatgccttttctctattcagtattttgatcaggatttctggtgataagtcaagctagtgagaaatttaagtcctgcttgtttgcaaaagtaagcaacacctgcagtttatattccagcttgccatgtgtatcatctcagccattataggcaatttccaaacattcttttggatgtttctcccactagacttccagacttcttcattaactgccttgttatctttcttgcatttataattttatttcagcttatttgggactttagctctgcattcatgtgagtgcagtctcaattccaagagtttggactacagcagagtccttgtcctgaaagaggtcaaatatagcaaaagaaacacacagactaccaactaccatgcagttaagtgaacaacagataccgatgaaatgcccattagcacctagcactgctttcaatgttgaggatataaatttgtaagacatgaactccttcaagaagtttaaaatagtgtagcggggaacagaggagggagatccataagaaaacaaaaaatactttaatggtcattgtatattaatgacaacaagatcaaatagatttctgcatagtagaggtcaagaagtggtatttgaattgagcataaagtgctcaatttccccaagcaactataggggaaaagaagtgagacctctaggctggaggaactttggggtaagataaccctcacagtaactactgtttattcactgctgtctccaagtcagacattctgccagaagccttgcatacgtgattcatttttatctttacaacagcccagtgaaggagaaaatggagactcagaaaggttaagtaacttgccctatgacagacatactagaaactagccatggtagattttgaatccaaatttgtctgactccaaaacctaggctaatagccgttaaactataccatgcactaaaagtgctagaaatgactaagttttaataatggaataatactcttttttatctctgaaatagttctcagaccccccctcttctcttctctgtgcttactgctttgtttcaggcccatcatcgccttcatctatgatagtattatcctctgggaggattgcttatctcctagcctttcttccttaaaatcaattccttgttgtgtttgcagttattacccattcttgtgtcacttttctgccttgacttaccttatttcttatagcataagcgtcagattccttagcatagaagcaataatctcatctgttttgctcactgctctatctccagcacctagaatggtgtctggcacatagtaagaactcaggaaatgtttgttaagtggatagggtatgttcacagtctggctctgccagtttttccagtcttaattcccactgctgcccctccagatagtcttagctccagctacctttggatgtttgtgaatgccatgttctttcactcctctgtgccttcacacgatttttcctcctgcattataatcactccttcctgttccacagaatatttagcaaactccaaattgcctttcaaaacttaaagcagcttcttccctggaaaatatattatgaatctccaagcacttccttttatgtgctcttactaactttgtaatagaacttacattgtttctttggattaaaatagttattgagcatctgcatgtaccaggtacagtactgaggaataggaaaaaatgtgaactatacttagtaatctctaatacaaagaacattgtggactattagggaaaacagacaagtaaactaacaaatttttattttttttttttatggacaagttttttttttatttgaatttttttttaatttattattattatacttcaagttttagggtacatgtgcacaatgtgcaggttaattacatatgtatacatgtgccatgctggtgcgctgcacccactaactcgtcatcgagcattaggtatatctccccatgctatgtctccccactccccccaccccacaacagtacccagagtgtgatattcccttcctgtgtccatgtgttctcattgttcaattcccacctatgagtgagaacatgcagtgtttggttttttgtctttgcgatagtttactgagaatgatgatttccagtttcatccatgtccctacaaaggacatgaactcatccttttttatggctgcatagtattccatggtgtatatgtgcccattttcttaatccagtctatcattgttggacatttgggttggttccaagtctttgctattgtgaataatgccgcaataaacatacgtgtgcatgtgtctttgtagcagcatgatttataatcctttgggtatatacccagtaatgggatggctgggtcaaatggtatttccagttctagatccctgaggatctagactgacttctacaatggttgaactagtttacagtcccaccaacagtgtaaaagtgttcctatttctccacatcctctccagcacctgttgttttctgactttttaatgattgccattcaaactggtgtgagatggtatctcattgtcattttgatttgcatttctctgatggccagtgatggtgagcattttttcatttgttttttggctgcataaatgtcttcttttgagaagtgtctgttcatgtccttcgcccactttttgatggggttgtttttttcttgtaaatttgtgtgagttcattgtagattctgcatattagccctttctcagatgagtaggttgcgaaaattttctgccattctttaggttgcctgttcactctgatggtactttcttttgctgtgcagaagctctttagtttaattagatcccatttgtcaattttggcttttgttgccattgcttttgttgttttagacatgaagtcctttcccatgcctgtgtcctgaatggtaatgcctaggttttcttctagggtttttatggttttaggtctaatgtttaagtctttaatccatcttgaattaatttttgtataaggtgtaaggaagggatccagtttcagctttctacatatggctagccagttttcccagcaccatttattaaatagggaatcctttccccattgcttgtttttctcaggtttgtcaaagatcagatagttgtatatatgcggcgttatttctgagggctgtgttctgttccattgatctatatctctgttttggtaccagtaccatgctgttttggttactgtagccttgtagtatagtttgaagtcaggtagtgtgatgcctccagctttgttcttttggcttaggattgacttggcaatgcgggctcttttttggttccatatgaactttaaagtagttttttccaattctgtgaagaaaggcattggtagcttgatggggatggcattgaatctgtaaattaccttgggcagtatggccattgtcacaatattgagtcttcctacccatgagcatggaatgttcttccatttgtttgtatcctcttttatttccttgagcagtggtttgtagttctccttgaagaggtccttcacatcccttgtaagttggattcctaggtattttattctctttgtagcaattgtgaatgggagttcactcatgatttggctctgtttgtctgttgttggtgtataagaatgcttgtgatttttgcacattgattttgtatcctgagactttgctgaagttgtttatcagcttaaggagattttgggctgagacaatgtggttttctagatatacaatcatgtcgtctgcaaacagggacaatttgacttcctcttttcctaattgaataccctttatttccttctcctgcctaattgccctggccagaacttccaacactatgttgaataggagtggtgagagagggcatccctgtcttgtgccagttttcaaagggaatgcttccagtttttgcccattcagtatgatattggctgtgggtttgtcatagatagctcttattattttgagatatgtcccatcaatacctaatttatggagagtttttagcatgaagggttgttgaattttgtcaaaggccttttctgcatctattgagataatcatgtggtttttgtctttggttctgtttatatgctggattacatttattgatttgcgtatattgaaccagccttgcatcccagggatgaagcccacttgatcatggtggataagctttttgatgtgctgctggattcagtttgccagtattttattgaggatttttgcatcaatgttcatcaaggatattggtctaaaattctcttttttggttgtgtctctgcccagctttggtatcaggatgatgctggcctcataaaatgagttagggaggattccctctttttctattgattggaatagtttcagaaggaatggtaccacttcctccttgtacctgtggtagaattcggctgtgaatccatctggtcctggactctttttgtttggtaagctattgattattgccacaatttcagctcctgttattggtctattcagagattcaacttcttcctggtttagtcttgggatagtgtatgagtcgaggaacttatccatttcttctagattttctagtttatttgcgtagaggtgtttgtagtattctctgatggtagtttgtatttctgtgggattggtggtgatatcccctttatcattttttattgcatctatttgattcttctctctttttttccttattagtcttgctagcggtctatcagttttgttgatcctttcaaaaaaccagctcctctttctgctagcttttgaatgtgtttgctcttgcttttctagttctgttaattgtgatgttagggtgtcaattttggatctttcctgctttctcttgtgggcatttagtgctataaatttccctctacgcactgctttgaatgcgtcccagagattgtggtatgttgtgtctttgttctcgttggtttcaaagaacatctttatttctgccttcattttgttatgtacccagtagtcattcaggagcaggttgttcagtttccatgtagttgagcggttttgagtgagattcttaatcctgagttctagtttgattgcactgtggtctgagagatagtttgttataatttctattcttttacatttgctgaggagagctttacttccaagggtgtggccaattttggaataggtgtggtgcagtgctgaaaaaaatgtatattctgttgatttggggtggagagttctgtagatgtctattaggtctgcttggtgcagagctgagtttaattcctgggtatccttgttgactttctgtctcgttgatctgtctaatgttgacagtggggtgttaaagtctcccattattaatgtgtgggagtctaagtctctttgtaggtcactcaggacttgctttatgaatctgggtgctcctgtattgggtgcatatatatttaggatagttagctcttcttgttgaattgatccctttaccattaggtaatggccttctttgtctcttttgatctttgttggtttaaagtctgttttatcagagactaggattgcaacccctgcctttttttgttttccatttgcttggtagatcttcctccatccttttattttgagcctatgtgtgtctctgcacatgagatgggtttcctgaatacagcagactgatgggtcttgactctttatccaatttgccagtctgtgtcttttaattggagcatttagtccatttacatttaaagttaatattgttatgtgtgaatttgattttatggacaagtttttaaaagtgtttgcagtggagagtatttattgtctattgcttagtagtaaattaccccaaaactcagtggtttaaaacaaacatgtattaattcacagtttttcgtggtcaggaatctgagaaaaatttagctgggtagttccagacacggattttctcatgaggttgcattcaaaatatgcaagggctgtggtcatctgaagtctagactggctacagggtctggttccaagcttacttttgtgattgtcaggaggcctaagttcctcactggctgttggcagaggcctcagttcctcatcatgtgggcctttgtagggctgctctcaatatggtagctagcttctgtgatagtaacagagatgaagagaagtagatttgtaaaagaccaagaatgcaaagtcagtattacttggtgactgatgagatgtgtgggaggtcaagagagagagagagagtcaagaataatacctatgtttctgacttgacgaaattgcagttgagtgattgtaccgttcaatgtaagtggactgtggtagcaatgtagaaaatggattagttaaggaagactgggtgaagaaacactagctaggttattgcagaaggccagactgagttcaggcagtagcaatgggttggaaatggtaagagatggaatggatagaattattatgatacagggcagagaaagaagtcaaggctcactctggggaattatatttaggcacctagtggataattatgttattgccaagataaggttggtgagaaaaggagcaggtttggaggaaaataacacagcctcaatttgaatatattgccatgtgtcaacgacagagacgtcttctgagaaatgtgtcattaggagatttcatccttgtacaaacatcagagagtgtacttaaaaaaaactagatggtatagtccactacacatctaggctatacagtatagcctattgctcttaggctacatctgtacaatgtgttacaatgtactgaataccataagcaactgtaacacagcggtaagagtttgtgtatctaaatgtatctaaacatagaaaaggggtaatgtgttgcactacagagttacaacagccacaccatcactgagccataggaatttttcagctccattataatcttatgggaccccatcatatatgtggtccaccattgcctgaaatgtcattatgcaggactgtattgtgtttgacgtgtttacgtgatatccaagtacagtttttcactgggcagttggtaatatgggttttgaattcataagagaagtctaggttgtagaaaatgatttaggagttaggccatagtaatcactgaagtaagcataattaatttaaagaaccctataaaaaagtcattattctacctctgaagatgagggaacatttcaaagagattttgactttttttttttttttttttttttttgaaatggagtctcactctcaccaggctggagtgcagtgtcgagatcactgctcactgcaacctccacctcccaggttcaagcagttctcctgcctcagcctcctgagtagctgggactacacacgtggccaccatgcccagctaattttttgtatttttagtagagacgggggtttcaccatgttggccaggatggtctcgatctcttgacctcgtgatctgcccacctcggcctctcaaagtgctaggattacaggcgtgagccactgcacctggccaattttgacatttttaactagtccaggaaacagaagagtgtgcaagaaaagggtgctcctatcagagctaagccctgtatagtatacagcacactaaaacctcaccaaaatcaatttgttcataatttatcttctttagtattctgagtattaaaactttgaaatgtctctgtgcatacaaaaagcagaatttggatttgaatttctctcattcactttgaaaggaaagaagattctatatgatatacttgcctttgccaaagaaagtgtgaattctcatgttaccacgcttggacctcaaaattttcctgccaatgacaaagaaccatggcttgttgatttctttgcccccgtaagttatttttatctgtcagattctaacattgtcagatcttctcctgttatggcaaaaagacattttctagataactctgaatcattagtacaaaaactgtgtcattccattatggccactaatgcatattgcttttaaatgagtgctaatgtaattactcctccagggaaggtttgccgctaagtacagtttgtcttacttagcatattacttgttgcagaaatgatgggggggttttttgtgtcatttggctcggtgcttatgaatattttttctttcctagtggtgtccaccatgtcgagctttactaccagagttacgaagagcatcaaatcttctttatggtcagcttaagtttggtacactagattgtacagttcatgagggactctgtaacatggtaaggcaaagtatcaaaaattattctaattaattttataaaatgaagaccttttggctgtttattattaaaacattaaaataacttagaaataatacatcttctatttagagtagtaacaaattatttaaacaaaataatatttttagaaagtggtatcaaatatgattggattaaaccatgcatagctaatcaatgcattgaatgtaaataaggtcttatttatcaaactcaggcaactattttcattaacttcataaaatgcttatatgattttccaattattgaagattgttatatttctttaatatttttgacattttataatttttttcctttggctttcttcatacttctaagtatatttgctggaaagaagttaaaacaatgaacaagccttttgaaatctttgtttaaatgaaattattttctcaggtaaatattcactcctcagttgcaggaagaactaaaaattatataccgtagaatgaaagtacgtaatatcacgtataaaatactttgggcaaaaaaaaaaaaaaaatcaatcctatagtagatctatctccagatctattagtctttaggaaattgaatgacaggggagcatgttaagtgacaccatggatatgaaatctgcacttcccagtatgggagaactttacaggacaaatacccagtatatacattgtatatagtggaggagagattaaaaagacttaaaagactatcagtcaaatacaacatttagactttgtttggatgcagtttaaacaaaccaagtgcaaagaaagagataattggggaaatgtgaacactgacaagatatctgatgatttcaggtaattattgttagtttttgacaacaaaaatgatactttggttatatggaggggagtccttatattttaaatatactgaaatatttgtggatgaaattatagatcatctgaaatttgctttaaaatgatcttgggagtagactagaaagggagtataagtgaagtaaaagtagccatgagtcagtgattattgtagctatatgaatacgcgagagtttgttgctctctacttttgtgaatgttctaaataactcataaaaaataaaatgtttttaaagaacatagatggagaaaagataaagggaaaaaagaaatgggaagaggaaggaaaacaaaagaaagccatacatttttagaacatcacagaagtttaagccagcagcaatggcacatgcctgtagaaatttcattaaaatacatttttataaaaggaaataaacaaggcctttggttttgaatgttttctctgtaactttgaaagaaatgccaaccaaagatacaaaattgatgtgataaacaataattatcttaattttaatttctttagtttagtttttttttttttttttttttgagacagagtcttgctctgttgtccaggctggagtgcagtggtgcaatctcagctcactgcaagctccaccccccgggttcatgccattctcctcccttagcctgccgagtaggtgggattacaggcacccgccaccacgtccggctaactttttgtatttttagtagagatggggttttacagtgttagccaggatggtcttgatctcctgacctcgtgatcctcccacctcggcctcccaaagttctgggattacaggcatgagccactgcgcccagccaatttctttagtttttctacttttcatcttagctcattaaacatatgtgagttcagtgtaaggatttaaaactatgatatcgatttacctggaatagaggccaagattcactactcaccaattagttgccactcaccaattggttgactttgaccaagttacttagcctctcagtaacttagtttcctaatttatacagtgggttttatcattttagcaactaagtataattgttgtgaagaataaatgagaaactacatgttaaatgctaaaataatgctcaacacatagttaaattttagctataattgctttgttaatcagtgaattatttgaatttgcacacatttttcaagactaatataaatgtttccattgttttttcaaaaattatttttgaatcctggtcaaagattccagtttgctaatgagtacttaaaactttaagagtgcaaagttcagctacagcaaatccacagacaaggatctctttataactttttgaaaaataaaaataaaagctttagagagaggcttcctgggctggtgcccattttaattctgagaaggaaattaagcatttcctactataaaggctatcttgaagaagaataaaaagggattacattcatagggcatgattcataattctttaacctaaaatataatcatgtaccccctaattatttgtgtctttattcttgctgttttatttcctgatcatcatctatttctagaaaaagtatttattatggtttaaaaaaaagactcaagctagagatatagcctgttgtttatagcctcttcttaccttggttcaggagagtaaaaagggaccattcgtataattacccatgccgatttctcaatgtttcaatgcctatggttctcatggcgaatggagcagctataaataaggatcaggtattcatcagtatttagcagtattcatcaccataagtcctttgctaaatttggtgagactaaaatttttgtcaccagaaatttagaaatgggtttttaaaatcttgttcttgttacttaaaggcaaacttgttataaatttgtaacaaataggtgaaatctataaaatctttaattcatattctccttcctatcagtataacattcaggcttatccaacaacagtggtattcaaccagtccaacattcatgagtatgaaggacatcactctgctgaacaaatcttggagttcatagaggtatttcagattatagactatgtgactagaaatttgtctgtttctatgtaaaccctgtatgaatgtttcatattgtttaataggatttactcttttcatgcccaaactattttcttacaaaatgatttttaaagaatttttctaatgttttactcttcttatatacttgtctgtaaactcaaagtaaatctgtgttttatttgttacctggtatgtacagtgccttataaacaatggacacaattatttattgaacatatgcaatgtattttcaccttgtcacccctttgcactgttttctctgaaaacaagtgtctggcatctacagcatctttttttttttttttctcagtaacactcttgatagaaatacttacaggggactcctagaaaaaaaaaaagaaaatttctagtttattattatccatttgatgaccctccaaccctgtcctactcacctgttcctcctcctctgacgtaatgttttgtcttgttttcccagtgaagctagcctcttcatcagtattacctgactgttgtaggctgaagctttgttaaaatatcatttggaacaaagaatctgtagaaaggtgtagtatctccagtcagaatgtcagaaaaatgagatagtaggctttccactagtaattaaagaatcatttccaaaccagtcattcttggttctagaacagaactttatggcctctgtagacatccaggcagcccttgaaactcttttattatccatgcagaaacttaaagttgcctctttgcctgttatgattttagtgatacatagagataaaggataaatagaccttgattttttacaaaactaatgagcaaaatccaaacttaaaaatctaagttaggtttattttcatattttaagataattcacattggatttcttttagctatccttaagcatcttttggtttctcaaaaatgggaactttctaaaggacatacacagattgagcacccctaatccaaaaatcttaaatctgaaatgctccaaagtctgaatttcatgtttagacttgggtttcattcccaagatatatgcaaatattccaaaattcaaaattctcaatacttccaagtattttggataagagatactcaacctgtaccaacaatttgccaggaatatatgaacagctatgctttatatatatgttataatggaagctatattctcttcaggatcttatgaatccttcagtggtctcccttacacccaccaccttcaacgaactagttacacaaagaaaacacaacgaagtctggatggttgatttctattctccgtggtgtcatccttgccaagtcttaatgccagaatggaaaagaatggcccgggtatagtaaaaatagtttattttaaatcttaacatttactaagaatgtttatttaacagaattattttgaaacggatgtgaatgaacccacaactaaattattacttaataacagtactgatcataccactttgattccagctctgtttctgtctggtgtgtgaatggtatagcctaccatttttgtgtgtatagcatctggtacactttttttttttggtcgggtagcagggggcagagtctcgctctggagtgcagtggcgcaatctcggctcaccgcaacctcaaccaccctagtagctgggattacaggcatgtgccaccacgcctagctaatttttgtatttttagtagaaacagggttttgccatgttggccaggctggtcttgaacccctggcctcaagtaatctgcccacttctgcctttcaaagtgctgggattacaaacatgagcctccgtgcccagtatatccagtacttttgactaaactgttgccaacaacaacccaaaaatttacctcatatttgtttcaattttttctaatttttttcctgctttatttttagagtttaaaaatatcatttcctgacatactgtaggacttaaaagtaagaaaaaaaagctttcagcatgtgtatttagaaaatttcctgaaaataggcaccatgttttaagttgtagaagattggaaacaaatcacttaaataccagaatggaaaatgcaattactacttcacatttgtttacaagataaaacactaaatctgagttaaagtgatttctagtatcttaacatttaggattacatatttttgtgctcttttcaataaaatttttaagttcaggtgtgagtcagtataacacattagacacctacaaagcttgttttcattggaaagaatactttgaaatattgcaaagactttcattagtttctagcactttgaattttagaagtatatagttttttctcatgtaacagttaaatgaaataaattgtttaatctgcaataattttagtaagtacttaattacaaaattagattacaaattcattagtataaatggtctattatatgttaaacccttatccatttttattgggtaaaagtcactgataaataatataataactgtttcaccataataatacaatgcttatttctttattgcaaacatatgtaaaaagttatggaggtaatctgttttttcttttacagacattaactggactgatcaacgtgggcagtatagattgccaacagtatcattctttttgtgcccaggaaaacgttcaaagataccctgagataagattttttcccccaaaatcaaataaagcttatcattatcagtaagtattctctcatatttgaagacatttattataattatttaattatacacttaacagttaagttacctgaacaaaataaaagttaacccaacaaatatttattgggagcccactacgtaaagatagtttgttaatgaacatttcagaagatgaaaagggagtattgaacagtctcactgtgcataaagcttatagtctagacaaaaagataaggaaaggaagagctaacatttattaagtccttaaacaccttatttggtttcaggtactatattagatactttactcaccttatttccaataatcctcacatatgctctgtgaactaggaattactacccttcctactattacagagaagtaaactgtgattctcagaccttagaatccaaggtctaggagttatctaaggcttagataacttccccaagtcacacagctgctaagttgaagttgaggtttgaacccaagtctgtctcagcacccatgctgtttccacaacaccacgtggtatttcaggtagaaaactcaaatgtaaggtacatatgatgaatgttattaaacaagtaaaaatgaaccatggatttcaagagaggaaagggtcacaactatgaggaaattatgaaaggctgcattttgtaggtagtttttgacatgtgtctttaaaaatgggtaggaatttgacagacagtaataacttgaataaagattcagaaactaaaacccttggacattctgagtttcgcaattcccataggtctacaggagatgtccagtagacagctagacattctgggctgtctggggcacaaagataccaagactagagaaaaatacatttgtgaggccttataaccagaatttgtagctaggtatatttgagaagagagataccagatgaaatcaatcaatataacttattttttaaattgctacaataagattgttttctgaatacatccaataatagagaatcctatttacaactaacattttttcttctctcagcagttacaatggttggaatagggatgcttattccctgagaatctggggtctagggtgagtaattaaaatatatatcattgtataaaatagattcaaagccatttaccccccttttatatcaatagttaaatttactgtgggttaaggttctagcattttaaattacttagtaaagtattatattaaccaagatagtactgtactttattacattgcccttccttgacatcatttttaacttagaaagtattacaatattattgcatttcatatgtttgctttggttttatataatgaaaaatgattttgatcatttgccacagatttttacctcaagtatccacagatctaacacctcagactttcagtgaaaaagttctacaagggaaaaatcattgggtgattgatttctatgctccttggtgtggaccttgccagaattttgctccagaatttgagctcttggctagggtaagtcatacctgtcttaaataagttgtagccacattcatgttttagtaattagataaaacattgtaagtatgtaatttttaggtttttttcttaaatgtttcctctgaatttaaaaatagctattatatttctatgactgtaatggttgtagtagatttcctctttctttgttaaagcttttagctaacatcttctctatcttggtagacatcatcatctactagccataaaagccagaaacgtctctttcttctccctcttgtctactttctcctccccaccccagtactctgttgccctccaggcagttactagattgtgtcagttttatcccctaaatgtctttcaaatgtcatttcttattcatctctactgctaacctgtttcttcaaccctttatcatctcttgtctagacttaaccatatttgccttttaagtgcagtcttcccttgatatactcaggggattggttccaggaacccccattccataccaaaatctgtgcagctcaggcctcacagtgggccctctgtatgcagggtttcacatcctatgactattctgttttccatctgcaattgcttaaaaaaaaaaattcccagttcaagcagttcaacacagttcaagcctttgttgttcaagagtcatctatggtattatactgtctacctttgtcagtgctgccctggtgatcttctaaaatatttccctctctgacttactaagtttcttaatatgcatacattgacttcaggtgtctgatatgagctctatctctattgtccacctcacaccttagattccagtgtaacagagtactccaggttctctgaacatgtgtccttatttacatgccgctccctctctctaaaatgctctgtccttaccttggtcatctgtattttttctcctcttactgcaaaactcagctccgatggcactgctctattctctgcccttctcagttaatcagtgtcacctggatatgttatcaagtgtactgatacagtgcatattaattctttatttattattacttgaaagatatttaatttgaccagaaataaaaggagctggataccaatggaaataattagttgtagcaattttgggttttgttcggttggttggttttatttttcggtatagcattgtccatcttcctttgtaaatggctgtctcttcctgagggcaaagtccatgttttatttatttttatatcctcagggcctaactcagtaaatgcttatataaaattaaactgaatacataccctcaatgcagtctgagcttttggtgtttctttctgtcgtaacagtcttattagtgacctaatccagattgatagctttcttgcctccataactcgaggaactcttgccactagtgttggtataaaacactcaactggaatgagaaagtcagctccagttccaccagttcacactaaagcttagcatcccaggccatgggaattttttagcagagggattttaaaggtcttactagctataaaagattatttttgttattagctggtgcatcagataagaggtttattctttccattctaatcttcttatgcttccttctgtaataattctgctttactccatttctcatgtactaaaaactttagttataaactttgtaatgcaactctatattgtatctagtagaaaattattaaacatgaaaaagaccatttattcaacaaattttaagtaccaaatgaaaagccattatgctaagtagtagggccacgtaactccacatgaaagaaaaggaagatgaaaagaaagaaattccatgtctttaaggagattttaatctagtggaaagagaaaatggaaataaatataagtaatacaagataattgctacagtaaaattagaatgaagctggaacaggggtagaagggtgtcagtgatgccagagaaggatgtttagagcaccagaaacagtatggtgccatctcataagtaattggaaatacaagtaagcaaatatacaaacattttgtaaatgacatagacacttacgaaattaacatttctacatttttcttactttcggtatgcaagtgtgtgtgtctgcctacatgcttgtgccctaacacaagttagtctgcattttagtaaacccctgccttggggacgaaactagaggcagcaaagatattttaagtgtcctgaagtgagaggtgataactttaatcaggattagggcattggtgatagaaagaaggggacaaatacaaaagacagataagaataaataggattgaatgtgatagatgaaggatagagaggagtctggatgagcctaatttctggcttgaactgaatgaatagaacgaggaaaagtgggttcaggggacatgctgtgtttggatgcttatgcggcattcacccaaagcaggccaatgcgtggttagatatgaaatcgaagagaatgattggggtacatcagcatatagatatgtaaaaccaccttgggcacctgttcacagtgaaaagattgttgatcaaagatggaactctgattggatattataacttgaggggcaggtaaaggagatcctcatgctggaaaaaggaagaacagtcagaggggtaagaaagccaagagagagtagtgataaatgctaaaaaagaaagaaaggagtggtcagcagtaaacatcagttgcgcaataagaagaccaaaaagtgcccagtttggtcaagcggtcactggtgaacttacagcagtttcagcagagggagcagtaagcacagaagacgactaaaatgttgccaaataagcagacaatgggaagcagtgaaacagtagactgctgctcaggaaaaaaaaaaaagagagagagcgtgagaagcactatgacagaggaaccataatccaggaaggaatcctttcatgattatatacatcttcactggagaatatgtgttctgacagggagggactggagaatacaggtggagtaagtcagccttcacgagacaaagagtgcccaaagagtcctaccacagcacacccccagtgaaaggagaaaaagatagaaacagaaacatgtttatggtatgatgtgccagtagtgggtggcaggaagaagttgagacattgcaggataaagctgctcagttttcttgatgaggcaaaggagggtttatttgctgttggagaggtggtgctaggtgaataggggcttaaagggataatgtggaaataatcttgtttgagtaggaagaattaaagttttttaaataaattcttagattcaaaatgttttatatcctattgctttgttgttgccaaaatagtttatgccaaacagaaaatggcaaactgtatttttctttttcagatgattaaaggaaaagtgaaagctggaaaagtagactgtcaggcttatgctcagacatgccagaaagctgggatcagggcctatccaactgttaaattttatttctacgaaagagcaaaggtatgtccagactttcctctgttccttcccttagtaggccaagctcaaaagatgtgtttcagtctgagtaatgttttttttctgttttctcatccttgtcatttttttatattattacatattactgatacaagtttttaaaatttacatgtataccaagcgatcttaaaaggttttttgtcttgtggttgatacagactcaattgccttaacatttttatactaatgaataggaaaactactagaaagagacaaaaaaagtattattcgtgataatctttgagtgctggaattcaaggtaattttctacttttctgtgaaaggttatggtgactgttgaggtcactaagaatactctataatacacactgctgcttggaataatatttccttagtatatttctattcagtatactttttactgaataagtttcaaagtaatgagcttcctttgtggggaggaaagaacaatgataaagtatttgccatgtactcatgttttctggtaaaacattaaaaatagataatttcaaatatttttatactttttgtccagagcttatagcttgcagtgaatgccaagaatgagttctcagacaattccagctgaacgggggcaagatagctcttctaagagagtccaccccagcattcatccgcacagtatttattgaaagggcttgttaaaccacaaacatccactagatggcttgaggtccagtcgtgagacacctgtggccttgtaaaagcactcaaactgcattctcaggaggctgtttttagcgttccttatcacaccacacactccactcctgtcctgttttcgggatcaaggaatttcattctcatgcacaaataacatacacacagtgcctcagtatttttccatgccccgacctcaaatgccacgtacataaggttgaatatattgccatgctcccccgatgtctccctcttctttaattcttagcacatgctggtcatccaatgcaaggtaaacttctattgttcttccttggtcatagatacgttgggtggcagcacagagccgtctgcaaatgcctagcaaacagataaaaaaaagaataagtacaacggccatcacctaaatgcatatgtttaacccagacaaccaagtgttggggtttaaccaatgaaaactttcttgtaattgctgaagggtacttgtttgtagttgctgtgactattcttcaagttgttcaatttacactcaagagtggaaatttgagaagacaaatagtcgtgataagccccttgcagatgtgctttcactctctcccaagcatattgggagctattatatggcagaggtgtgacacagaattatattgccaatcacaatgtaaattttgacgggtaatgaatgcctgctgctgatcccctagccattcaaaagtggcttcaagggtctctaagtgagacaaaatagttttatcaatatttacctattcctgaaattcatgggttacattatataccatgtggcttatcactgaggctgtgtgaatagattctgtcagagaagcagttgcagtagcggcagttgctaatataataatagctgagagtaaaaaggcaactgaagtggccagaaatcttatttttcaagtatgagacaatgcttttctaaataggtgcagggtggaatcctcttcctagctccaagttaaatttacaggcagccaccattctgcatgccattttaagatcatgacacaggttatatttaattatgtaacgttttgatgagagaagcatgtagcataccaactactggaagagactttaatactataaaaggattgattctgctctatgttaggaacaccttgccgaaacaaaagtatataagggtgcatagtacaaatcaagactatgtcggtaacattattatgcagagagagggtatagttgccaccgctagtaatatactcaccatgggaaagaacccattcaaaaaaaggaagtcctaatctccaaatctgggtatgagcatggcttaaagcttgtttcccttttacttgtaatattggtcctaaaagcccatactctgaccagatgatagaactattggagggactcctaaatccaatagtctgatctgcagacataagattaccatggggaccctaatcaagtaaggtgtcattatcaaacagaggctcttgatgcagcgcaggctgtttgcatggcgaccactggatggcctcacacttatatcgccagtccgtactcagacagcatataggaagatcaggcacttgtgtagcttcattagagacctcagtaagattagtgctaacagcagacataaaggtcaagtttgcaaacttagtatccctttggggctggtaataaagatactcctgaagaatgagagtaacacacttatcatgtgctattatggggaaaaaaagggggattactagacaataaaatcaagtagtaattaagtttaatccatcccaaattttcagttaaggggtaagacaggggcatctatcaacctcctgtcccaaaagtatcattggatgacaaaggcaggtcagcatcccaccatgtaataacattaaaaacggggatttaaaacatgactccaataaacatgttcttgagctgatcccacttggcaaaggacaagaattgccagccaccccaacatccatgtttgtcttactttctcagaagtttccccagttaccaccagatacttaagaaaccgattccatgcggttgcgagggcttccacagctgcaagccaaatagatgcctgttgattcaatttctttagctgtccccaggtagtgttaggtgccttccaagtcatcaccttcattgttgtggtcgattctctaacaacaggtcctgttctcgaaaagagagccccatattccccgttttttgtttaagatatatattaagagtttgataagcttgtttaacaatggcttgactagttgaggtataaggaatactagttttgtgttgtatgtgctaaagttgcaatgcatatgcaaatcgagcactaagctagcaaggtctattatcaggttttatagtttgtggaaggtttaaagttataatggattcaaataaatgaccaattgcatctttagttttttttctggtctgggggtagcatgtattaggcctgtgtaagtgtacacggtaacgtggagaaatttaaaacgtttaaagggtggatactgagtaacatcagtttgccaaatagcattaggcaccagaccttgtaggttggcaccaagccttaaggaaaaaggggaaagagaatgctgttggcaatcaggacaagttttaataatcatgcgagcttgagcaagtgtcaaatgaaactgttgtttaagaatccaggcgttctgatgaaaaaaatcatgatcagctggactcgcaaaaaagcaggagaatctgcagaccacatctatggtcatactagagcatcaccttgagcattcttttctgataagggaccaggtagcttagaatgagagcgaatatgtatgatgtaaagagggtgatgatgggaccgaggagctcttgtgctggaagaaacaaagctagtaggggttcattagtaatgcccttcacatgtgcaagatttaaatgagtaatactatacaccatgtaagcagaatcactaactatatttatgtcttggtgaggaaaagttggttgcatgctgccttctaggttttatctcagatagctctggctttcttgctacccacagaggcctggggcaggagagttgctaagatgcaactaacttttccttatactccagggaagcagaaaaaagacacggccagaaaggctgatgctggaaataggaaatgagaacttgcatattaggaagactgtcataatcagccactttccttccctcctgtaggcacccctccagcagggaagtttgttgaggagacgcagccacctaatcatacaaatgttcgctgaccgggggtataatctaagaactgtcacttgggcggcctctaatctacttaagggggatgggaggtgctgttgcctgaacggggccaacagatgcaggtccctttaaggttggaggaaagaaaggcaatggcttttctgtagggggaggaaaaggctccagtctgtccttatcctcactagaaaaaatatactccttatgccctacagaagggaatcaagtagagagaggagcacccccgtgctgttctggttcctgtttttcctcactagaaaaaatctcttccttattccccatagaagggaatgaagcgtagagtggaatctctccctttaaatcttccaaattcctttcaggtggagataatgggcgatctggtgggtaaagaggataccacgcagagcgtaccggtgcccaggtggccaaaatagtagcgttaataaaatgaccttgctcatttcctcttttcaggcagtgacctacctgcttccataaccctaaatctaaggttccgtgatcaggaaaccaagggcatttctgccaaattaaaagcataagcttgtgtagagctccaggatctacagtgcactggatagccttaagtagctgttgcactgttttaaaaaatactttctgttctttggtcatttcctgacccatgataacccaacccctggtattttatgcatgggtcccatcctcctgatgggagtcaggactgtcccttactgggattcctcgaaaattgatgagctctcctccttcacacataacttcaaggtgatcacgtcgagggcaccacttgcagagcttatagcttgcagtgaatgccaagaatgagttctcagacaattacagctgagcagggccggtgagggggtggggggcagctcttctaagagagtccaccccagcatcatccgtccaccaagtatttattgaaagagcttgttaaaccacagatatccactagatggcttttttgaggtctggtcatgagacacctgtggccttgtaaaaatgctcaaactgcgtttcaggaggctgttttcagcattccttatcatactacacactacactccgtatcctgtttttagggtcaaggagttacattctcatgcacaaataacatacacacagtgcctcggtatttttccatgccccaacctcaaatgccatgtacatacgtatgaatatgttgccgtgtgccccccacattttgaaggagaattaggttaagatctgatgttatttattggtggttacattttgtgatgaatagggctaaattaagaaattggatgatgaatttcagaaatctagaattgccacacatctagatttttcagtgaaggtttttgatttgtcaagaatctgtcttaagaacaatctagagcaagcagaacttgatggaggtgagaggcagcttatatcagagcctgagtcttcatttctttgaatcaacagctctatttctcagttttcagaatagctgagagatgggtgacataaatagggatcttcttcagataatatcagagaagtatcaatttaatgagcagttacaagagttaaccataccatagacagagctgtttgaaaagatgttgccatgtgtccagaggagtccaggggacaaagttaggaaccaaacatccctgtccaaattgaaagacaagggtagcattcagccattgaggccagacaggaaggccaaagcagaataatggttggagtaaggagaaacacaaaccaggtgggcagttacacacaaaacaaaattctagcacatagttggggattagagttcacaccaagattaagacaacaggtggccccagatccaaataagcaggtcaggatatgctgacctgttccttcccctgcttttcagccaccttcctgctgtgcgcagatgaaaactaggagatacatgttgctttccattactgttgttggtcatggttgggcagtgctaatgattgtattagagtggaatgagttcggtcctctgggaacatctttttgtttgtttgttttaattatactctaagttctagtgtacatgcgcacaatgtgcaggtttgatacataggtatacatgtgtcgtgttggtttgctgcacccatcaactcatcatttacattaggtatttctcctaatgctatccctcccccagccctgaactccccaacaggccccagtatgtgatgttccccccactgtgtccaagtgatctcattgttcaattcccacctgtgagtgagaacatgagatgtttggttttctgtccttgtgatagtttgctgagaatgatggtttccagctacattcatgtccctgcaaaggacatgaacgcatccttttttatggctgcatagtattccatggtgtatatgtgccacattttcttaatccagtctatcattgatgtacttttgcggtggttccaggtctttgctattgtgaatagtgctgcagtaaacatatgtgtgcatgtgtctttatagtagcatgatttataatcctctgggtctatacccagtagtgggattgctgggtaaaatggtaattctaattctagatccttgaggaatcgccacactgtcttacacaatggttgaactaattaacactcccaccaacagtgtaaaagtgttcctgtttctccacatcctctccagcatctgttgtttcctgactttttaatgatcgccattctaactggtgtgagatggtatctcattgtggttttgatttgcatttctttgatgaccagtgatgatgagcattttttcatgcatctgttggctgcatagatgtcttcttttgagaagtgtctgttcatatcctttgcccactttttgatgggtttttttttattgtaaatttgtttgagttctttgtagattctggatattagccctttgtcagatgggtagattgccaacattttctcccattctgtaggttgcctttcactctgatgatagtttcttttgctgtgcagaagctctttagtttaattagatcccatttgtctattttggcttttgttgccattgcttttggtgttttcgtcatgaagtccttgcccatgcctatgtcctgaatggtattgcctaggttttcttctagggtttttatggttttagatcttacgtttaggtctttaatccatcttgaattaatttttgtataaggtgtaaggaagggatccagtttcacctttctacatatggctagccagttttctcagcaccatttattaaatagggtatccccattgcttgtttttgtcaggtttgtcaaagatcagatggttgtagatgtgtggtgttatttctgagggctctgttctgttccattggtctatatatctgttttggtaccagtaccatgctgttttggttactgtagccttgtagtatagtttgaagaaaggtactgtgatgcctccacctttgttctttttgcttaggattgtcttggcaatacgggctcttttttggttccatatgaaatttaaagtagtttttttcaattctgtaaggaaagtcattggtagcttgatggggatggaattgaatctataaattactttgggcagtatggccattttcacattattgattcttcctatccattagcatggaatattcttccatttgtttgtgtcctcttttatttccttgagtagtggtttgtagttctccttgaagaggtccttcacatcccttgtaagttggattcctaggtattttattctctttgtagcaattgtaaatgggagttcactcatgatttggctctctgttgatggtgtataggagtgcttgtgatttttgcacattgattttgtatcctgagactttgctgaagttccttatcagcttaaggagattttgggctgagatgatggggttttctaaataaacaatcatgtcatctgcatacagggacaatttgacttcctcatttcctaattgaataccctttatttctttttcttgcctaattgccctggccagaacttccaatactatgttgaataggagtggtgagagagggcgtccttgtattgtgctggttttcaaagggaatgcttccagtctttgcccattcagtataatattggctgtgggtttgtcatgaatagctcttattattttgagatacattccatcagtacctagtttattgagtttttagcatgaagggctgttgaattttgtcaaaggccttttctgcatctattgagataatcatgtagtttttgtctttggttctgtttatgtgaaggattacatttattgatttgcatatgttgaaccagccttgcatcccagggatgaagctgacttgatcttggtggataagctttttgatgtgctgctggattcagtttgccagtattttattgaggattttcacatcaatatttaggattttcacatcgatgttcatcagggatattggtctaaaattccctttttttgttgtgtctctgccaggctttggtatcaggatgatgttggcctcataaaatgagttagggaggattccctctgtttctattgattggaatagtttcagcaggaatggtaccagctcctctttgtagctctggtagaattcagctgtgaatccttctggtcctggactttttttggttgataggctattaattattgcctcaatttcagagcctgctattggtctattcagaaattcatcttcttcctggtttagtcttgggagggtgtttgtgtccaggaatttatccatttcttctagcttttctagtttatttgtgtagaggtgtttatagtattctctgatggtagtttgtatttctgtgggattggtggtgatatcccctttatcattttttattgcgtccatttgattcttctctcttttcctattagtcttgttagcagcctatcaattttgttgatcttttcaaaaaaccagctcctagattcattgattttttgaagggttttttatgtctctctttcagttctgctctgatcttagttatttcttgtcttctgctagcttttgaatttgtttgctcttgcttctccagttcttttaattgtgatgttagggtgtcaattttagatctttcctcatttctcctgtgggcatttagtgctataaatttccctctaaacactgctttagctgtgtcccagagattctggtatgttgtgtctttgttgccattggtttcaaagaacatctttatttctgccttcatttcgttatttacccagtagtcattcaggagtaggttgttcagtttccactagttgtgtggttttgagtgagtttcttaatcctgagttctaatttgattgcactgtggtctgagagacaatttgttgtgatttctgttgttttacatttgctgaggagtgttttgcttccaattatgttgtcaattttagaataagtgcagtgtagttctgagaagaatgtatattctgttgatttggggtggagagttctgtggttgtctattaggtctgctttttgcagagctgagtgcaagtcctggatatccttcttaaccttgtgtctcattgatctaatattaacagtgtggtgttaaagtctcccattattattgtgtgggagtctaagtgtctttgtaggtttctaaggacttactttatgaatctgggtgctcctgtattgggtccatatatatttaggatcgttagctcttcttgtggaattgatctctttaccattatgtaatagccttctttgtctctttgatctttgttggtttaaaatctgttttatcagagactaggattgcaacccatggtgttttgttttgttttgttttgttttgttttttggtttccatttgcttggtagatcttcctccatccctttattttgagcctgtgtgcatctttgcacatgagatgggtctcctgaatacagcacactgatgggtcttgactctttatcaaatttgccagcctgtgtcttttaattggggcatttagcccatttacatttaaggttaatattgttatgtgtgaatttgatcctgtcattatgatgttagctggttattttgcctgttaattgatgtagtttcttcatagcatcaatggtctttaccatttggcatgtttttgcaatggctggttccagttgtttcttcccaagtttagtgcttccttcaggagctcttgtaaggaaggcctggtggtgacaaaatcagcatttgcttgtctgtaaaggattttatttctccttcacttatgaagcttagtttggctggatatgaaattctgggttgaaaattcttttaagaatgttgaatattggcccccactatctcctggcttgtagggtttctgccgagagatctgctgttagtctgatgggcttccctttgagggtaactcgacctttctctctgcctgcccttaacattttttccttcatatcaaccttggtggatctgacaattatgtgtcttggggttgcttgtcttgaggagtatctttgtggtgttctctgtatttcctgaatttgaatgttggcctgccttgataggttgaggaagttctggataatatcctgaagagtgttttccaacttggttccattctccccatcactttcaagtacaccaatcaaacagatttggtctttccacagagtcccatatttcttggaggttttgttcatttctttttactctttttttctctaactttgtcttctcgctttatttcattaatttgatcttcaatcactgataccctttcttccacttgatcaaattggctattgaagcttgtgcatgtgtcaccaagttcttgtgccatggttttcaactccatcaggtcctttaaggtcttctctacactgtttattctagttagccattcgtctaatcttttttcaaggtttttagcttccttgcaatgggttcaaacatccttctttagctcagagaagtttgttattaccgaccttctgaagtctacttctgtcaactcatcaaagtcattctccgtccagctttgttccattgctggcgaggagctgcaatcctttggaggagaagaggcgctctgatttttagaatttttagcttttctgctctggtttctccccatctttgtggttttatctatctttggtctttgatgttggtgacctacagatggggttttggtgtagatgacctttttgttgatgctgatgctattcctttctgtttgttagttttccttctgacaggtccctcagctgcaggtctgttggagtttgctggaggtccactccagaccctgtttgcctgggtatcaccagcagaggctgcagaacagcaaatattgcagaacagcaaatattgctgcctgatgcttcctctggaagctttgtcccagaagggcagccgcctatatgaggtgtctgtcggcccctactggaaggtgtctcccagtcgggctacatggggatcagggactcacttgaagaggcagtctgtcccttctcagagctcaaatgccgttctgggagaaccaccactgtcttcagagctgtcagacaggaacgtttaagtctgcagaagttgtctgctgccttttgttcagctatgccctgccaacagaggtggattctagaggctgaaggccttgttgagctgtggtgggctccacccagtttgagcatccctttccactttgtttaccttctcaagcctccacaatggcagacacccctcccccagccaggctaccacctcacagttcaatcttagactgctgcactagcagtgagcaaggctccatgggtgtgggaccctctgagccaggcccaggagagaatctccttgtctgcagattgctaagaccttgggaaaagtgcagtatttgggcgagagtgtcccgttttttcaggtagtctgtcacggtttcccttggctaggaaagggaagtcccctaaccctttgcacttcccgggtgagacaacaccccccccaatccccgccctggcgtcttctcgccctctgtgggctgcacccactgtccaaccagtcccaatgagaagaaccagatacctcagttggaagtgcagaaatcacctgtcttctgtgttgatcacactaggagctgcagactggagctattcctactcagccatcttggaatgccctctcaaactttatccaggaacatctgttcttgcacagtttcgatgttttgaggcttttggagtcagtgatgcttttttttttttttttttaacaattgtttcatgtttccgtgacactattattagtatttattttaggtacattatgggttaactgcttttgcagcattatttccttgaagagaataaatttgaatttcaaacacttcaagttttggaacaaaagaacttgaaagcatatttaatcaagtttcttaggtggaaatgttatgtttttattaaatacttaaaagataacaagtgtttttaattttagagaaattttcaagaagagcagataaataccagagatgcaaaagcaatcgctgccttaataagtgaaaaattggaaactctccgaaatcaaggcaagaggaataaggtatggactaagcctagagttgactttggcaaaagttggcaaaagttagcaaaatctatttttcctatacattacatgcatccagagacaacaaaatgaggcatcaaaaaatagtaagatagctgaaaattctactttgggaaataggacaatcaaaatgtagcctagacactgaaatgcttttaaaaatttggacaagtaaaaccacttaacaaaaaatagtgactgtggtccatgcaaaaacatgtatacaaatatttatagctgtatcattcataatagcaaaaaaaagaaatgtctgtcaactgacagataaatgaaatgtggtgtatccattgaatagaatattttcagccataaaaggaatgaagtactgacctatgctacaacatgtttgaactctggaaaatgtttagtgaatgaagccagtcacaaaggccaaatattatataatactattgatgttaaatatctagaataatccatagggacagaacgtaggttaatggttgcctggggccgaagtggagtgggatagaaaagagcaaaaatggggtaactgctaatgggtagtaaggagtttattttgggaatatggaaaaatgttttaaaattagattgtaatgacagttggacaactctgaatataccaaaaaccactaaactcctttaaatgtgggaattttatggtatgtgaaatatatctcaacaaagccattaaaaaaaaaatagtgactgtggccataaattatttaaattttgttcaaatgtaaataaagcattgaattgttaggaataaatatactggagcctcataacacgttttgaatagcaaattttcttttgttcttggtgtaatcagaatgtattgaaacccatatttgtgttggcccctctttgaatctttaatctgtcaagaagcagcacaacctttttcctgttactcttcagaaggcagttcagttttacctttttcaaatcggtgttactgtagatcatacttaaaaacagaacaaagagtctatgaatgttgtagtgcttttaaaatggaatttaatacaatcacatgaggtatctcggattctttccctatgaggcgaaaggaggacaaaatagctcagcctctggaaagggctagagaagactggctttatagcaccatattagacaataggttctactgtaatccagttcaaactgcagaccccaatagacaaagccttacaacctacctcaagaatattttttacgaatctgaaaggtaggaaagagttatgagtctgtattttcttggttccactgaacaaacatgtttttctagtgtttcgctatattagttttctcaagatattttattttgaaaggtgtaacttttatctcattaaatatttgaaatttaaaaattgtcataatctaaaatatcatacctgaaattaagttaaagagaatacccaatatgcttgaaattatgtaaacctatatagttagtaatatctgctgtgagcaggtaagaactaggatattcttttcttttttattgttatattttggcaaagtatatttcatgtcatgatccattaaataagaatattgagtatttctgaaaaagtaaaatgttggtttgtggtatttcaccttatttttaacattaccaactcatactttctcctttctctatcgcctttacattattattataggatgaactttgataatgttgaagatgaagaaaaagtttaaaagaaattctgacagatgacatcagaagacacctatttagaatgttacatttatgatgggaatgaatgaacattatcttagacttgcagttgtactgccagaattatctacagcactggtgtaaaagaagggtctgcaaactttttctgtaaagggccggtttataaatattttagactttgcaggctataatatatggttcacacatgagaacaagaatagagtcatcatgtattctttgttatttgcttttaacaacctttaaaaaatattaaaacgattcttagctcagagccatacaaaagtaggctggattcagtccatggaccatagattgctgtccccctcgacggacttataatgtttcaggtggctggcttgaacatgagtctgctgtgctatctacataaatgtctaagttgtataaagtccactttcccttcacgttttttggctgacctgaaaagaggtaacttagtttttggtcacttgttctcctaaaaatgctatccctaaccatatatttatatttcgttttaaaaacacccatgatgtggcacagtaaacaaaccctgttatgctgtattattatgaggagattcttcattgttttctttccttctcaaaggttgaaaaaatgcttttaatttttcacagccgagaaacagtgcagcagtatatgtgcacacagtaagtacacaaatttgagcaacagtaagtgcacaaattctgtagtttgccgtatcatccaggaaaacctgagggaaaaaaattatagcaattaactgggcattgtagagtatcctaaatatgttatcaagtatttagagttctatattttaaagatatatgtgttcatgtattttctgaaattgctttcatagaaattttcccactgatagttgatttttgaggcatctaatatttacatatttgccttctgaactttgttttgacctgtatcctttatttacattgggtttttctttcgtagttttggtttttcactcctgtccagtctatttattattcaaataggaaaaattactttacaggttgttttactgtagcttataatgatactgtagttattccagttactagtttactgtcagagggctgcctttttcagataaatattgacataataactgaagttatttttataagaaaatcaagtatataaatctaggaaagggatcttctagtttctgtgttgtttagactcaaagaatcacaaatttgtcagtaacatgtagttgtttagttataattcagagtgtacagaatggtaaaaattccaatcagtcaaaagaggtcaatgaattaaaaggcttgcaactttttcaaaaacctgttagaatatgctttattgtgttttgaggagttttcctttttttcttttcaatatcactttatcctgctcaccagtatttcctcataagggttattatagccataattaatgttaaaatagactttgttcttcatattctcccatctttttcgctactatatactctgtctggattctgctgtatgcctgttggcatatatggaacagtcaccacttgtcacacttaacaccagctttttgaattatgatcagtaatggcaagagcctttcattctcgaatgtttaaagcctaggagttctacaaaattggcttctttctacaagaatcccaaaatggaatgcctaaagaagtcttacttgggtaaatacttactaaaatatactggttatgtgcatatcaccacactggacactgaggagtgttcaaaaggaatctaagacatggtccccatcttccaactgtctgtaattcactgttttgtcattgagctcataaggtacttacattactacctataaatgtttcctgtacttgttagttgttgagaaacattttaggcagtaaataaaatagtaaatattatgtgtcctataatttgacctaagctgtgtgcctttggaatcagctctaagccagggccccctgggagtcatgttaagaaacacgtatcataaagtgacatacatcaaggttatcttatatagtcataacagtattattgggtctttcaaaaacagctggcagattgagcttttaatggctatattgatacagtagatagagcacctctaaggagtaccaggtataatgtgccatttctctcagcaacaccatttttgtgtgcagctgaccctctaacatggtatcaattctagctgaccaaagcacattctatcaggcagccaggcttggaaattaggtccatttaaagtatgtggcttacagtcaggtatggtggtgtgcgcctattgtcccatctacttgagaggctgaggcaggagggattgcttgggctcaggattttgaatccagcctgggcaacatagcaagaccccatctctaataaataaattatgttttgggcattaa

SEQ ID NO: 528 - DNA, 4759 bp, Homo sapiens
tagttattaaagttcctatgcagctccgcctcgcgtccggcctcatttcctcggaaaatccctgctttccccgctcgccacgccctcctcctacccggctttaaagctagtgaggcacagcctgcggggaacgtagctagctgcaagcagaggccggcatgaccaccgagcagcgacgcagcctgcaagccttccaggattatatccggaagaccctggaccctacctacatcctgagctacatggccccctggtttagggaggaagaggtgcagtatattcaggctgagaaaaacaacaagggcccaatggaggctgccacactttttctcaagttcctgttggagctccaggaggaaggctggttccgtggctttttggatgccctagaccatgcaggttattctggactttatgaagccattgaaagttgggatttcaaaaaaattgaaaagttggaggagtatagattacttttaaaacgtttacaaccagaatttaaaaccagaattatcccaaccgatatcatttctgatctgtctgaatgtttaattaatcaggaatgtgaagaaattctacagatttgctctactaaggggatgatggcaggtgcagagaaattggtggaatgccttctcagatcagacaaggaaaactggcccaaaactttgaaacttgctttggagaaagaaaggaacaagttcagtgaactgtggattgtagagaaaggtataaaagatgttgaaacagaagatcttgaggataagatggaaacttctgacatacagattttctaccaagaagatccagaatgccagaatcttagtgagaattcatgtccaccttcagaagtgtctgatacaaacttgtacagcccatttaaaccaagaaattaccaattagagcttgctttgcctgctatgaaaggaaaaaacacaataatatgtgctcctacaggttgtggaaaaacctttgtttcactgcttatatgtgaacatcatcttaaaaaattcccacaaggacaaaaggggaaagttgtcttttttgcgaatcagatcccagtgtatgaacagcagaaatctgtattctcaaaatactttgaaagacatgggtatagagttacaggcatttctggagcaacagctgagaatgtcccagtggaacagattgttgagaacaatgacatcatcattttaactccacagattcttgtgaacaaccttaaaaagggaacgattccatcactatccatctttactttgatgatatttgatgaatgccacaacactagtaaacaacacccgtacaatatgatcatgtttaattatctagatcagaaacttggaggatcttcaggcccactgccccaggtcattgggctgactgcctcggttggtgttggggatgccaaaaacacagatgaagccttggattatatctgcaagctgtgtgcttctcttgatgcgtcagtgatagcaacagtcaaacacaatctggaggaactggagcaagttgtttataagccccagaagtttttcaggaaagtggaatcacggattagcgacaaatttaaatacatcatagctcagctgatgagggacacagagagtctggcaaagagaatctgcaaagacctcgaaaacttatctcaaattcaaaatagggaatttggaacacagaaatatgaacaatggattgttacagttcagaaagcatgcatggtgttccagatgccagacaaagatgaagagagcaggatttgtaaagccctgtttttatacacttcacatttgcggaaatataatgatgccctcattatcagtgagcatgcacgaatgaaagatgctctggattacttgaaagacttcttcagcaatgtccgagcagcaggattcgatgagattgagcaagatcttactcagagatttgaagaaaagctgcaggaactagaaagtgtttccagggatcccagcaatgagaatcctaaacttgaagacctctgcttcatcttacaagaagagtaccacttaaacccagagacaataacaattctctttgtgaaaaccagagcacttgtggacgctttaaaaaattggattgaaggaaatcctaaactcagttttctaaaacctggcatattgactggacgtggcaaaacaaatcagaacacaggaatgaccctcccggcacagaagtgtatattggatgcattcaaagccagtggagatcacaatattctgattgccacctcagttgctgatgaaggcattgacattgcacagtgcaatcttgtcatcctttatgagtatgtgggcaatgtcatcaaaatgatccaaaccagaggcagaggaagagcaagaggtagcaagtgcttccttctgactagtaatgctggtgtaattgaaaaagaacaaataaacatgtacaaagaaaaaatgatgaatgactctattttacgccttcagacatgggacgaagcagtatttagggaaaagattctgcatatacagactcatgaaaaattcatcagagatagtcaagaaaaaccaaaacctgtacctgataaggaaaataaaaaactgctctgcagaaagtgcaaagccttggcatgttacacagctgacgtaagagtgatagaggaatgccattacactgtgcttggagatgcttttaaggaatgctttgtgagtagaccacatcccaagccaaagcagttttcaagttttgaaaaaagagcaaagatattctgtgcccgacagaactgcagccatgactggggaatccatgtgaagtacaagacatttgagattccagttataaaaattgaaagttttgtggtggaggatattgcaactggagttcagacactgtactcgaagtggaaggactttcattttgagaagataccatttgatccagcagaaatgtccaaatgatatcaggtcctcaatcttcagctacagggaatgagtaactttgagtggagaagaaacaaacatagtgggtataatcatggatcgcttgtacccctgtgaaaatatattttttaaaaatatctttagcagtttgtactatattatatatgcaaagcacaaatgagtgaatcacagcactgagtattttgtaggccaacagagctcatagtacttgggaaaaattaaaaagcctcatttctagccttctttttagagtcaactgccaacaaacacacagtaatcactctgtacacactgggatagatgaatgaatggaatgttgggaatttttatctccctttgtctccttaacctactgtaaactggcttttgcccttaacaatctactgaaattgttcttttgaaggttaccagtgactctggttgccaaatccactgggcacttcttaaccttctatttgacctctgcgcatttggccctgttgagcactcttcttgaagctctccctgggcttctctctcttctagttctattctagtctttttttattgagtcctcctctttgctgatcccttccaagggttcaatatatatacatgtatatactgtacatatgtatatgtaactaatatacatacatacaggtatgtatatgtaatggttatatgtactcatgttcctggtgtagcaacgtgtggtatggctacacagagaacatgagaacataaagccatttttatgcttactactaaaagctgtccactgtagagttgctgtatgtagcaatgtgtatccactctacagtggtcagcttttagtagagagcataaaaatgataaaatacttcttgaaaacttagtttactatacatcttgccctattaatatgttctcttaacgtgtgccattgttctctttgaccattttcctataatgatgttgatgttcaacacctggactgaatgtctgttctcagatcccttggatgttacagatgaggcagtctgactgtcctttctacttgaaagattagaatatgtatccaaatggcattcacgtgtcacttagcaaggtttgctgatgcttcaaagagcttagtttgcggtttcctggacgtggaaacaagtatctgagttccctggagatcaacgggatgaggtgttacagctgcctccctcttcatgcaatctggtgagcagtggtgcaggcggggagccagagaaacttgccagttatataacttctctttggcttttcttcatctgtaaaacaaggataatactgaactgtaagggttagtggagagtttttaattaaaagaatgtgtgaaaagtacatgacacagtagttgcttgataatagttactagtagtagtattcttactaagacccaatacaaatggattatttaaaccaagtttatgagttggttttttttcattttctatttgtattttattaagagtgtcttttcttatgtgattttttttaattgctatttgatatggtttggctatatgtccccacccaaatctcatcttgaattataatccccatgtgtcaagggagggacctgacgggaggtgattggatcacgggggcagttgtccccatgctgttcttgggatagtgagttagttctcatgagatctgatggttttataagtgtttgacaattcctcctttacacacactctctctctcatctgctgccatgtaagacttgcctgcttccccttctgccatgattgtaagtttcctgaggcctcctcagccatgtggaactgtgaatctattaagcctcttttctttataaatgaaaa

SEQ ID NO: 529 - DNA, 4943 bp, Mus musculus
agtttcgatttcctatggccagccggctaggcagctttttcatcgggactccttggaaagtccccacttcgttcatctctggcggatttgcgggagccagggcgctcatcgatcgcctggagccacagaatgacagcggagcagcggcagaatctgcaagcattcagagactatatcaagaagattctggaccccacctacatcctcagctacatgagttcctggctcgaggatgaggaggtgcagtacattcaggctgagaagaacaacaagggcccaatggaagctgcctcactcttcctccagtacctgttgaagctgcagtcagagggctggttccaggcctttttggatgccctgtaccatgcaggttactgtggactttgtgaagccatcgaaagttgggactttcaaaaaattgaaaagttagaggaacacagattacttttaagacgtttagaaccagaatttaaggccacagttgatccaaatgatatcctttctgaactatccgaatgtttgattaatcaggaatgtgaagaaatcagacagatccgagacactaaagggagaatggcaggtgcggagaagatggccgaatgtcttatcagatccgacaaggaaaactggccaaaggtcttgcaacttgctttggagaaagacaacagcaagtttagtgaattgtggattgttgataaaggtttcaaaagggctgaaagcaaggctgatgaggatgatggagcggaggcgtccagcatccagattttcattcaggaagagccagagtgtcagaatctcagtcagaatcccgggcctccttcagaagcgtcttctaataatttacacagcccattgaaaccaagaaattaccaactggagcttgccctgcctgccaagaaagggaaaaatacaataatatgtgcccctactggttgtggaaaaacctttgtgtcgcttcttatatgtgaacaccatcttaaaaaattcccatgtggacaaaaagggaaagtggtcttcttcgctaaccaaattcctgtctatgagcagcaggcaactgtgttctcacgatattttgaaagacttgggtacaacattgcgagcatttctggggcaacatctgatagcgtctcagtgcagcacatcattgaagacaatgatatcatcatcctgacaccccagattcttgtgaacaatctcaacaacggagccatcccctcgttgtctgtcttcactctgatgatatttgatgagtgtcataacactagcaaaaaccacccatacaatcagatcatgttcagatacctagaccacaaacttggagagtcacgggacccactgcctcaggtcgttgggctgactgcctccgtcggcgttggagatgctaagaccgcggaggaagccatgcaacatatctgtaaactctgtgccgccctggatgcctccgtgattgccacagtcagagacaacgttgcagaactggaacaggtcgtttataagccccagaaaatttccaggaaagtggcatcccggacttcgaacacgtttaaatgcatcatctctcagctgatgaaggagacagagaagctagccaaggatgtctccgaggaacttggaaagctttttcaaattcaaaacagagaattcggcacccagaaatatgaacagtggattgtcggcgtccacaaagcgtgctcagtgtttcagatggcagacaaagaggaggagagccgggtctgcaaagcgctcttcctgtacacatcacatttgcggaaatacaacgatgcactcatcatcagtgaggatgcacagatgacagacgctctaaattacctcaaagccttcttccacgatgtccgagaagcagcattcgatgagaccgagcgagagcttactcggaggtttgaagaaaaactagaggaattagaaaaagtttccagggatcccagcaatgagaatcctaaactaagagacctctacttggtcttacaagaagagtaccacttaaagccagagaccaagaccattctcttcgtgaagaccagagcactcgtggatgctctgaagaaatggattgaagaaaatcctgcactaagctttctaaagcctggcatactgactgggcgtggcagaacaaaccgggcaacaggaatgacgctcccggcacagaagtgtgtgctggaggcattcagagccagcggagataacaatattctgattgctacctcggtcgctgatgaaggcattgacattgctgagtgcaatctcgtcattctctatgagtacgtgggcaacgtcatcaagatgatccaaaccagaggccgaggaagagcacgagatagcaagtgcttcctcctgaccagcagcgctgacgtgattgaaaaagaaaaggcgaacatgatcaaggaaaaaataatgaatgaatccatcttaagactgcagacatgggatgaaatgaaatttggaaagacggttcaccgcatacaggtgaatgaaaaactcctcagagacagtcagcacaaaccacaacctgttcctgacaaagaaaacaagaaactgctgtgtggaaagtgcaagaattttgcgtgctacacagctgacattcgagtggttgagacgtcccactacactgtccttggagacgcttttaaggagcgctttgtgtgtaagccacaccctaaaccaaagatctatgacaattttgagaagaaagcaaagatattctgcgccaaacagaactgtagccacgactggggaatttttgtgagatacaagacgttcgagattccagtcataaaaattgaaagtttcgtcgtggaagatattgtgagcggagttcagaaccggcactcaaagtggaaggactttcattttgaaaggatacagttcgatcctgcagaaatgtccgtatgacctcaggcttctccgtctcgtgccgcagggagccgtgccttaagcatggagttgatgagccaatgctttcttacccaagcttgcacaatcctttcttacacaagcctgcactgtgttgaatgccagataacctgactggttggtttcaagctggtgctgtccacacaaagcacacacgcctgaactgcggcgccgaatagtttcttcaccaataactcatagcgtagcccttggccatggtggggaggggttaaacttgtcccttttacacttttcagaactgcccgacagggaacgtgcagccactcggtacaccgagacgcatgatggctggcgtgctggaagggttcccgttctctgtctgctcgatctgctgtaagctgcctttgcccttaatgacagtgcccttaagaacagtgacttagttctttttcaggccaccagactgactgccagatcccttctgtcccttctgtcccttgcactgattcctttccggatttgaccctgccaccctgtcaccctctgcagagtctcctggtttctgtctcttccttggtttctttgctgactcaaatttggtagttgcaaggttcagtatgcacacatatatatttaaaatgacatataatttaaaatgtaaaagactatagttgacagctatgcttactgagatggtatttctgttctgttcattactatacatcttacccttgctctcatctgttcttttaacttgggccatttcccgtctttgaatagacatctcaaaccctgtctgtatgtctgtctgtttcccacctgtttgagacagggtctctctgtagaccagaaactccatatgtagactatgctggccttgaactcacagatccccctgcctctcaagtgttgaaattaaaatctttcaccatgcctggctctagctattttcaataaaggctcatgtttaaagtttgaactacttccaattcattccctgacgtggcttgttgttgttgtttacttttggagacactgttcctctctgtagccctggctgtgtagaccaggctgcccttggtcacagagatctgccagcttctgcctccggagcactgagattgaaggcctgcatcaccatgcctggcttgccctttcttcttaaacattatatattcaaatggcatttccgtgtttcttctcaaggtgtgccagtgcttcagagagcttagtttggggttcttcagatcaagagacaagtgtctgagcgctgttactgccaacagagcaaagtactcttcagttcagggaaggaacagtgctggttttgtaggcagtacagtggttttaacaccttcctagaacttacttgtaattcatcagttgtagaccatcaatggcctaaaccaaactgcagagatcatctgaccacataactccccttccaggacatttacatttgaagactatcccaagcccacccagagcacagtgggttacccaaactccccaggtcaaccctggaggtcaacagtatgacatgggatagcacaccacttctcacagatgcctagagaaattacccagcaacataactctttggggaaaaaacacctatagggattaggcttttaattgatagaataggtagaaaaaaagatatgtagtagttcttgatagtggttactggtaaaattcttagtgcaataaaatgaatttgccgagagctgactttcttttttttcttgtttttttgagacagggtttctctgtatagctttggctgtcctggaatgcactctgtagtccaggctggccttcgaactcagaaatccgccttcctctgcctcccaagtgttgggattaaaggcgtgcgccaccacgcctggctgagagctgactttcatttatgtcttttagtctatgttgcctttctttgctgctacagtttaagaactctacagcttgtataagatacctactggaaattatttgagaaaaaaaacttgtaaacattacaataatttaattaattaaaaatttatgtattt
